United States Patent Application Publication US 2006/0288444 A1 - sequence listing, part 2

SEQ ID NO: 3791 - DNA, 1007 bp, Glycine max
ccagcttgcatgcctgcagtcccatattgtagtaccttacaaaaattaggctacttaggactaagtcatcacatggattttgtttcatacaagtgaagctattgaaaattttaacagtttatagttaatagacacttataagaaaacagaaaagaaacgagactataatgtatattgcaactttctggttttatatgttttatgaaataactgatggttttcataaagcatgtaaaagtacaaagttgcaatatacatttcattcactgataatttatctcagtatcttgagaaattagtatttaactcctggcaagggataccctaggtttacctaaaaaaataactgataattttctggcatgtgcagatacaggaagaattataaacgtgtcaacatacaagctataaagaattgggcttgccaaatcttgcaaggtcttgtttatctacattgccatgatccaccagtgatccatagggacctcaaatgtgataacatatttgtcaatggtcatcttggacaagtaaaaattggtgatctgggactggctgcaattcttcgcggttcccaattagcacatagtgttataggtactcactatgattccaataagtgttgcacacttgcaagtactgtactaagaaactgctactatttattattgtcaaataaaattttctctttttgtgctaggcactcctgagttcatggcaccagaattgtatgaggaagaatacaatgaacttgctgatgtatattcatttggcatgtgtgttctggaaatgctcacatctgaatatccatatagtgaatgttctaatccagcacaaatctacaagaaagtgacatcggtaagttcagattctagtgtaagttttcaggatatatgtaaagctaaatttttatttagaggtagcattttatatttcagggaaaactaccaatggcttttttccggattgaagacatggaagcacaaagatttattggaagatgcttggta

SEQ ID NO: 3792 - DNA, 965 bp, Glycine max
ggaagaataatgaagttgcaggctaggtagaattgtatgtgtaaatagacatttggagaaaaaaataggtttccataatggtatatcaagagatcgaatgttaaatctttggcatttggagaaaaggttaaagttgcaagaaggaaaaacaaaaagaatattagcaaagcagattagagaaaatacctgtgtcagcccaacaatacctttaggttctcaacatcacactgaagagttaaatgaaaggaagaaggaagctattttgggggaaaccttttatcattcccttattcatatatagaggcacaattcaaattcatgtagttatagaaacaatgaggcacattaaaaacgcagaagataaaacattgcaaaagagaggaagatttattgtgcaaataaattgccattatgaggaaaatttgatgagagtattaaatgagataattataagggagaaaatgttaatgaaaaaaataaatggaattaatgtgaaagtttaggatgaaagatttgtctgatacgtaacacgatttatatatattaagattagattatatcataagctacattttttgttttgtttttagaataaacaagataaggagaggatcaaattttggcttgttagttttattatctttttaagaatttgcaaaattcaataaatttaatcaaatatattatattttaaaataaaagataccgtataaaaattatcttaattatattcaatagttataaaatccatcacaaaatgttaaacaatacgatgattctaaggagatacaaagttagttgacttcttataaaagaagggaaaagaaaaacattgcaaaattgatttttttttaataacaaaaattaacaattaatatttattagtaaaaaaataataactatataatttgactaaccctcatttgatgttaccatataagaatatacttcatgcatctcaaaat

SEQ ID NO: 3793 - DNA, 1067 bp, Glycine max
tgtgtggggtcgtgatatttgttttcattttaccgcaagataaaaattgactagatcaaaagcagctaattaaatttaatttaattaaaattaactaagcaaagtccaaggttagctagcccaactagcgatagaaaattaagatttggggacgaagatatttaaattaattatgtttggtacatgttttcgccctttaaaattactacttttaaactaagaatttaaaagtaaaataagatgcttagcaacttttatttatattttaactttaaaaaaaaaggtaacccgagaagggtaattaagaagctagagagaaagtagggagagcgatagaagggggaaaaaaagggttgcaaggagagaaataagaaaaatcaactctttattttataaagtttttatcctacttttttaaaaaattacctttttattttattttataaaaattaagctgttttaaaacatttccaaaatgtatttgctccaacttctcaagaaaaagagaagttttttttaacaaaagaaaaagagaagttaaaaaataaataaaaccctatgctagtttatactagtaaaaatcaaaattagtgatggacatttgtgacaacataatccctcatatttagtgatgagtttgtgagggatttaaaaaatttgtaacagacatatatttaagtaaatttgtgataaattcataaaatattttaatttaaagtattaataaattgatatacattttttatttttagtttttacactttcccactttacaggaattaaattcaatatagctattccaggacttgctttttcctttcactgatatttgtgaacaatatatggatcttgtgattatccttatatatatatatatatatatattattgtaggctggcaaagatcatggtttggatcaggagttagttattttatatagtggtcctaatgcgaacattaatatcacgggttggcaagagcaaataaccgaaaatggtgtggggtatgtcacatgttataggcactgtcagcttcaagcttgacccttttaaaatgggtccacacaa

SEQ ID NO: 3794 - DNA, 1201 bp, Glycine max
agaaggttatagccggtggagtcgccggtggtactattgtacaactttgcccccttctttaacagccttcaatgccttattactttctcctgtgttttttggaattgaccatgtcttaattttcagtaataacaattgaaaagtgctaataacatactctttgacccactcatttaaatacttacgacttaaaattaattaaaaattataaaactaaaagagaaacattagctataatgtaagactcaatgttattattctcaataaattttaagcaatcaaaaggtttgtgttcaaaagagcaaccaacttcatgtaaagccaaaaatttatgatcaagatcaagtactgacctactgtatcatacactacatcaaacttttctaccagttcttcaaaattctcctttgtataatcaatagccaagtctgctcctaagctcctcaacaaatcctgtttcggagtactagcagtggctgcaaccttagatgcgccaaaaacgtgcttggcgagctacatcatatcaaacaaatacacacatcaaatcatttgatattttataaatattgtatataattatgctacaaacattgtgtaaacaaaactggtacgtgaaattagtttcttagaggattaaatcatatgttttgaaaaaaaagaagaataaggtcatatccacgtaaacttctccgtaagtaattataacagaaaaacaaaatgaaacgagttttgctataaaataatattaatttatgtataagttaatttataaaatttaaaataaaaagagattttgtcataaattaatattaattaactcatacataagttaatttataaaaattatctcgtaaaaacttttctaaaaaatatcttttaacttaattatacataaattaattttaactcatagaaaaattcattttattgtttttctattctttttactacaattgcttatagagaaatttatctaaatagatcataaataatcaattaatccagtggaaggagtgaaatggttgaactatttcatctattagactccttaataatttaagcttcttgacaagttaactaatggcaatggaagatatcaaacctgaataacaagggatccaactccaccagcacctcctagaacaagtatagatttgccagcagaaaactcaattttatcaaatccttataagcagtgatg

SEQ ID NO: 3795 - DNA, 1221 bp, Glycine max
gaagaacacaagggagggatctggttgcagaaccagctcttgcagggtggtttcctcggctccttcaccgctgcgtcagccacaaagtggccggaaacaaaggcggtgctggtcaccggagttgcatagccggtttgttaaggctttagaggagcttggaggttctcaaggttagtagttaaagcaacatcaatgttatcttggcacatgaatttcattaattagtagtgcaattattttgcttcttaacatagggtctttatcacactcagcattttgattgaaaggaaattggggatggactattaaatggatgatcgtgcctaaaatgtgtgctagtgttagaagttaagggattgtgcctaaaataagttgtgaattaagtttggatcagccaagacacagataggaaattttacatattgcattgcatgtcatattatctgtcatcctgaaagttctctacaagaacagatttgacaagtcataatgatatgacctcttatttagttcatgattgtctagtttaaatctcttggtcatttcaattgcagcaactactccaaagcaaattagggaactcatgagggtagatggcctgaccaatgatgaagtaaagagtcatttacaagtgagttcatattgttccatctccccttactgccttctaatgtttgatttgagattaacacatggttgtttattattgcagaaatatcgacttcatacacagcgagttccagttgctaaagctgcaaattctaatcgctctgccgtagctcttggaggcttgtggatgcacaatgaatccttaaagggtagaagttctggttctcctcaaggccctctccaattagctacacaatcgggggaagcgacatcccgaactgaaggtgacaacatgatagatgatgatgtaaaatcagacttataactggaaaaaggtcacattcataaacatggaaaaggtgatgtgtagatattatctcaccatgaattttgcagataaagtagaggagttttacaactactcaagaacaacacatgatattgatgataaataaaagaggatggatctatggagagaggcttttgagattttaaaggatcagttttccttccattcaatgagttttgatatgatactctgaagctggagcagttcatttgtccaaaatcataatgatcattcatttctttttgccatgagaacactgtggt

SEQ ID NO: 3796 - DNA, 1023 bp, Glycine max
gcttgcatgcctgcagcaaagaaagctggtcgttacaagcaaattaaacgtactgaaggagtttccagtacagatatcgtaggtactaagcttccatgttgataattgataccttgatactccccaatgattttcataaatcattgtcaagctaataatatgcatttgatctaactatgtatcaatacaggaagaatactgtcttctttaagagatcaaaagaattgtgacgatcataatggcactgaggtaaaacctcaagaagaaaaccagtcacaggcttcccacatagcccaattcctaccaacttctcgacgtattgtccagttttcaaatggcaaggtatattttggttgcttgtgtcatgtctattcttttaaagaaatggtgtatatttggttcataattctagaaaccaacttattctctggtgaatatttatttagatatattattgatgtttctttaagagctatgctaagccatgccaagatttacatggctttgcttaatgcaacaaacaatggttcaaaatttatgggacaattagtgggttccagttgaaaatagttagaggcaatttgtcttcttcattacagtttgcagaactttttcatgcgatgatccattgtcacttcatcttattttagggtcctggaccaaattcacgtattgtatacattgatggggcatttgatctcttccatgcaggccatgttgaggtacactgttaagttttgtattgggtcatttgggtgtgatttattatctactcagttgaatgctaaagttcatgatcaaacaggcgggccacgttttacttatttgttgtgctataattgtgtttcatttatttttccatgttctttcagatacttaagagggctagggagcttggagactttcttctagttggtatccactcagatgagacagtgaggtatatgatttattattgtgcaaagttgattttatgggtattatccagtggtattaaccacagataagaaactaacaactctt

SEQ ID NO: 3797 - DNA, 1213 bp, Glycine max
taaaaccctggatttttctctagagtcgacctgcagaggattcaagtgcagccacactcactcttaactgaatcagcacataacacctcgctgtttttgtcgtctaccccattattttactttatcgagggaccgtttgaacatttcctctttcttcagaaaatttgtaacgcgaaatttcattttttaaaaggagatgagaagcaaagaaaggaaaaaaaaattaaaaataataataattgaaaaaaaaaagattttcattctcagagcaaccaaacagatctaatttctcatttctcacttttgcattctcctcgcgacgaggcatcacgcgataaccatcagaatggcaccgtttccgccagagaacggcgtcgaaggagacgatgagagagaagaggaagacgaagaagaagaagaagacgacgaagaagaagttgaagatgaagaagatgaagaggaaccgaggctcaagtaccagagaatgggaggaagcatcccttcgctgcttgcgagtgacgccgcgtcgtgcatcgccgtcgcggagcggatgatcgctctcggcactcacggcggcaccgttcacatcctcgattttctcgggaatcaggtcagtctacgtctgccatctgtttgttgcgtaattcggcgtaattcggcgtaattcgtcgcgattattgtgaatttgagctgttgttactcgaattggagctggctagattgaatttatggaacggaatgattcgtgtgattgagaacttgtgttcgttgattttctcttcaaatgtatgctagggattgtggatatcatttggtttgtgttgacactgtgagctttgagattccgtgtagctgctgtcgtgtgatttagaatctcgtaatttctgtgaatttgaactgttattaatctaattggagctggttagatcaattttttcaataaatttacagaactttttttccccctgaatttacagaacttaataatccgtgtgattgagaacttgtttttgtagatattctcttcaaatgtatggtagggattaaatttgagctgttattactctaattggagctggttagatcaaatttacggaacttaataatccgggtgattgagaacttattttggttgatattctcttcaaatatatgctaggtgttatggatataatttggtttatgtcgacactgctctttgatatttcacgta

SEQ ID NO: 3798 - DNA, 1051 bp, Glycine max
tttacccagagccttatgcttgtgaaccatcaagtttgccaaagtatcctcccagcaaagaattggatgtaaaactgagagatgaagaagcaagaaggtcctcttcttctcttctcatgtttgagaataacttctggactgattttgctttttgtccagtttctcattgatggttttcatttcaacctcaggcaaaaggctctaaatgggaaagctagtgcagttgatggtgcaaaaaaagtcagagtacgtgagcgtgaacgtggtcgggctgttccagcccctgaagccaatgcagagatccaaacaaacttagatgtaagtcatacacgtagttgtttgtgtctgtcatcctttttgcctcccttggtttttctatttgttttaatttcttattccttcaaatcccaagttcgtgcttatgtcatacacttccatgaataatgaatatcttaggttctctatactcttgggactaacatacacttttcatgactattttaggtccgagtttcctttatttttttattctacatactcaagctggcataaatttttcatgaaaccttgtcatttgcgcgattagctatatttataaattgtaatgatgtctggaacttgagagtcctagattctttagcaattttttactttggattctttgatcatgtctaccctgaaatttaaaatatggttttcatgataatattttttattccttggggacatagaactttgtgaaacttttgtttgatctgatgatctcatggtgaattgagcttttcatttagtgtcttatatgttgccttgagcaacattattacatgtgtcactgaatttcagaggtggagagttgtgacccatgcaaatgcaaaaagcaagagtgagaaatttccacctcctcatcaagatggagctgttggatacccgcaagatgcatcaaataaaggacctgtttcatttggcgcccctgacacttccttctcttcagggatatttaattcaaaaccttctggacatgttaggaatcatgctgctgacaggcatgcaa

SEQ ID NO: 3799 - DNA, 1039 bp, Glycine max
ctcatgatttttgcgctctttaatttttctttttccccttttatgtgtttggaaaccataatgccctatcactctgtttcatggcctgcttatctagtgactttattgaaatcctttgttaataataacttgatttagcttccatgcagcacaaaaattcccacttcgtatttactcatcatgttatgcaagcattctgtattttttatgcaaaatgtcatgctgtctgcaatctgcatgataactgttgtaagctgtttgtttcaattgaaatgctgatatcttttcatgaagatgattccaaagaagcatgtttttatcaaagtaattttagttgcatttaataggctttggtgaaatgaaacatgttttgatttttccatgtttacaaacaataaggaacaaggtatgcacagttttttgctgatgcaaatatctgtctctccaattgtcagtaaattcgtgattgtatcctgatattcagtgaaacaattttacttctttgagaaacttaaaggatccttggtatgattgcaaaggagtgtctgcttggtaagagtgggggtgaacatatgaaggtagagaatgaaagatgtatttggactcttatactcaaattacttgctgattttcttctatattcactcttgcatttctgggagcttgtgattatgcttagtcatgttaatttcagtgactaagacttgtgtatgattgtgctagaaactaggcctcagtctccattattcccttgctttcagtttttttttatttttcatgtaatgaatattgttcattgtttttcttttccatccacctttatgtttctgaatctgtatgcaagttgcaagtctaaatctttagtttaacaacagtttgcagggaatgcatagacaagaagttaatagatgagaaattaaagcattgtccaatatgcaatagagacttgggttgttctccacttgataaattaaggtagtctcaatgaacatgactctactttcagaaatgatcgacagattagtctataattctctct

SEQ ID NO: 3800 - DNA, 1009 bp, Glycine max
tgtttcgccagcttgcatgcctgcgatacaatttggatttgagtttgggtaatttgatctctaaacatagcaatagtcaatcatcgaggaatcacttcccaaattctgcaaccgatcagcatatgccacctgaatctaattggcagagtgggggaagcaagcctaaggttcatgtaatattttctaaaattcgttatttattggctagttcactcttatgtatgattaatggaaaaatgtgtttttaattcctataccttcaatcaaacataaataaggttctctatactttggtgaatttaatcttcaaacttttaagcgtatgtggatttaagtctttattttgggtgatttttattttcataaatagtcaattagggacggtatccatgtctttcaaaatttgagtactcaattcactgatgtaagagtacaattgttcacgtttgattgatagtgtaaagttaaaaatacatgtttttcctttaattaatttcctgctgaattctacatgaacaccccttttgactcctcattatgtttcattcagctggttaatatacttccaaaaccatgtggtagaagcaacatggaagcctatgggcaaggtgagagtgaaaccttgaggttgctaagccaaactcaccttcaatccccaaccactaaagaaatgcacagatatggtccgtataggtcgccagcagagccacaaatgcctcacaatttcgcacatcatcttcaccaaccaagttttcatgtgggtacctcttcaattaatttctgtttttggtcatgcatttaatttaaatggacaaaagatgattcaggaagcgcccattaaatttattagtaaccaacatccaagtggagtttaatcttttttccccctctgatcatgcaggttcctagcagcagcagcaaccgaggccgtattggaagcgatctttcgttatcaatgtccgatcaacaacaatggcaacaagccgggcctccacatttgttagcaact

SEQ ID NO: 3801 - DNA, 1344 bp, Glycine max
agacttgcatgctctgcagaaagaaaatgaatttgtcaaagatgttagctcagatgattccagacctgcaactgacatcaaagtgaggaaaaagtatcctaattccagattagctacttcacctcaacgaaaatgtagaaattctaatttagacaaaaagctatgtgatattgctccaaaaactgcacggaaggcctacaagaaacagtccaaggttgctccagataaagatttgaactccatggatttacctttacaagtattttatcctcaaacattttgtagcgccaatactgaattttgctcctttaaaggaagtaatggtaataattctggactagtgttcaatattgaaaacaccactcccttattaatgctgaaaattctgcattgatttctgttagggattcaaaccaagagtgccctgtatactgatttacagctgatagatgaagatgaagaggaacaagaagcacaagaccttaaatcccaaattactactaaattcagaaagttgaacatgagtttcccttcaaagctaaaagctcgggaaaagcaggaactggaactagaggcattttcttccagagaaccatatgacagttgtacagaagttattcaaagtacacccataattgtatcaaccaagaggcagcgaagatccaaaccctgtaatgatgttgccattttaactgagccgatgaaccggaagaaaatttctagaagggcagtgcaacctgacaagcatgaaactgaaggtggtgctattgttccttatgatagcaacttctctgaattacaaaagagaagaaaagtttcaaagttgccaatcaccgtggacatggaaacaaattcagatagggtttctatggacagtggaagccagttagttcttcatactagcaagttgcattccttggtggattcccatgatgggacctcatctttgctgcctggtgacttgaatagcttgtcattgactgatttgagggccatggcaaaggaccacaaagtaaaacagtactataagcttcgaaaaggagctttggttgaacaattagctaagcagttcagaagctgctgaacttattactggtggtaacccatttttctgccatgcttttttgggtatccctcttggttggttttggtaatgtccagtggttccctggaatttggtataggattctgacatagttatgaatgatacataggcaaaccaaaatgggttttgtaacaggaaattgtacagcctatatagatagaattcttaacagtttgtaaatgaaaggaagtataggttttcttccttgcaactggttagtcattgtgactgcaggtcga

SEQ ID NO: 3802 - DNA, 1208 bp, Glycine max
ttttattttctgattttgtaaacaaactagcattgtcacccatgcaaagcacagaaatgggtccaaaaatttggtcactaattttttcaccctaactggatcctaaacattctagttcaagataaagatttttttcacaggtttttatttattcttaattttgtaaataaccatttcttaaacttgcatccagcttattgcgtaagactttatgacagtagattaaataggcactgcttgaataagcaattctttacataattgatacagggctatatggtgttatacttttatcaaaaatggaaactttggttgacaatgcccaatggcatgtattgactcatgcagccaacaccgcacaatgggataagataatgttgttgctgaatacatccaattagcatccaaaggccacaataacatagcaaacaatgtataggggagggatctagataaggattttgagctgccattccacttttggtccagtaatattaaatctggattcttgtataggggagggattagaccatagatactttttgtaatgggtattccagtatactcagagattggggttatggtattctaatatctcaagcatatttcaataccataatcttgcatagacaacatgtacactgggatgtacagatattagtactacttgtactgattatatatatatatatatatatatatatatatatatatatatatatatatatattttggaaggcagaaaatatatagtattattaataataattacagtaccaggggtactgatggtaggattatacaaggcaggtgaactgccagcctcccaaaaaatacaaaaacccatcacaaagcccaaccaaaggatagaaaatccagattaagcaaaggcctcctttaggttggatgaccaatgattaaaaaggatattaaaatccttatctctagctttagaccaggaccaagccaggaataaagcatcatccattactttggaagaaacataaggaatgccctgaaaaatcaataagttcctatgcttccaaatggcaaaagttaaggcaatccaccacccacaccatctagactgacttcttcctacatcaaaaccttcacagaataggctgaaatgacttgctggagaataggggagggctccaatagccaggatccatatcaaagattcccaccacaggccaatagtgtat

SEQ ID NO: 3803 - DNA, 1097 bp, Glycine max
ttgaaaaaaaggtgtgctgcatcttcatccaagttgttacagaacgggcatagtggatcagctatctccacttgtcttcctcttaaattcatcttcgttggtagacggtctttgatgagcctccatgtaaatacctttgccttgggtggtattttaagtttccacagaagcgagaaactcccatcctctgattccccccttacttcccccagcagaaacttatatgcagatctggtcgaatacattccattcgagtcatgcttccaaacccatgagtctgatccttgatgctgtactgctagccctcctgtttcctctaggaattcagcagccattgtagcttcactatcaaataggtttctcctccatttgaagttccattcccacccttcctccttatgacttcccaagcgactaataggttgctgatgttggttagatacttgatacagcatagggaatttttcttttaaagatctgttgtctccaagccatttgtcctcccaaaatctgatcatgtctccactccgcaccttccactccatttgattatttatatttaatagctcctcttgttggttgagcttccgaaggtccttccaccaatgggaatgaaggctgctgtttctttcctcatctaaatttctccatcccccatactttgagttcaagattctggtccacagctgtccattctgatggaacatctcccatctccacttaccaagcagaactaaattaaatttccgcaagtctttaacgcctaaacctcctctctccttaggtaaacaaactgtgccccactttacccatacgatcctcctttgctccacacctccaccccaaaggaaattacgctgaatcttgactaacttgtctactactttgccgggtaccctgaaaaaggagaaaaaatagataggaagcgctgttaagactgcattgattagagtgactctccctcccaaggaaatgtgtttttgttttcatctcgtaagttttgcctcacacttcctaataatcgggtcccaggtctctctacgtcttggatttgccccaatggggataccaaggtaggaaaaaggcaaagacagcat

SEQ ID NO: 3804 - DNA, 946 bp, Glycine max
tatttatgtacggaacctagtgtatatgtattagataggttaattacgattttggtgtcatgtatatatactttagtcacaagctctattggctcctcaaaggaacatgcacagtcctcggcaagatttggtaaccctcgttggacatcgtaagtaataaagtagtaattttaccactgcatgagaatgtgacattattcgagagcctcgtgcatgcaacctcaaaccactcgttttagtgttattcaaatcacatccccccaagcttcattacacttcagcagtgtcgtaacgttactacctacaatttcaatggggaccagacaggagttgctattatgtttttttttttatataaaaaaaaaagactagatcgtgatgatgaatttatattgaacttgaaatgtgaataaaaacggtattcattttactttgtgcaataatttttttaatttaaacaaagttttttatgctgtgttgaagtttaattttctttattaaaaaaataaaagcaataaaaagaaaaatttaaataacttaattatcaaaattctatcgataattattttaaaaagttaatctatcaactttttttgttttcataagttatctccttgatagacaatcttgttggaacatcagatattaaaatgtgaaaattttaaagcttgttggttcgtaacgttacgagagaccaacctgaattattcatgtatgctagacctaaatcttgttagtatctaacaagtttgtatacatgaataattttatacttttatatcttaatttaattttaaaatatgtcgttatttgactaatgttgttgtgcagggtaataaaaaaaaaaaagaacaatgggacggtgcccttggcagttgaccctttctcgtattccgcatagcaacaaacagaagcaaagtggtaaggcattgggcagattaagaat

SEQ ID NO: 3805 - DNA, 1134 bp, Glycine max
atacaattatattgttaagaaggataaacattattcatggtggaataactgaaccatagttttacattgtaacagaccatagacattctaggacctcctactaatatctcagacattttcgctgagttggttcttaacaagatatttttagcataaggaattgaagcccctttggttgataacaaggcttatcaagctctgatatcttggttcttaacaagatatcagacttagagcccatttggcaaagtgatcaggagttgattcttgccttttccactcggaatattaaatttaagagtacgtacattacactaactaaccttgagttttcgtgaaattgcacacactccctagaggctacctatccatttaggatagactctaataccatgttagaaagtgggtttgagctttaactaaaccttctgacttacaaggtgaggattgctcttcacttatataatttatctcgacattattttatttgatatgaaacttcaacatatctcatttttctcatgactactcgtcatgtgagactttcaatacacctttctatctaggtgtgatcacaaatagaaactttcaatacactcctctatccaggtgtaaccacaaatagacaacataaagagaaactcatggaattagagtgtaatttgctctaactttaaattatagcataggtaaaaatgtgtcagttctttgtcctttttttaccctcagagtgccttgatgttaggggatgtgttaataaaaaactattcttgggcccaactcttgtatagttgtattattccttggttagggctgagattgcatcgcaaataagtagtcagcttacctgtcctaaatccacagcagggtttagactctgtccacaatcataaataatatctgtttgcagaaatctggtttctccattcagaagatctatttcgacctgagaaataattcccattgtttagcatgccaatataagataagtcagttacttcagtagcatggcttgtctgaaaataagacataagcacttaagattcaagaaaagtaactaccagtgcacttaacataccattttaatttgagatatgcatagaaaacaaaaactcaaaccaacttacctcactt

SEQ ID NO: 3806 - DNA, 1148 bp, Glycine max
agaatagagttgaggcctcaggttcttaagttcctgaaagaaatgtttctcaattagaatgagtaacgttttttttttttttttttgcattgcttagaggtccaaaatcttagtaatgtcataaagaggtttgatgatatgaatttgaacaaatgagaaacaatagtaacagacacggtaattcagtttagtaagttgaaatgaatggcaattgtggtagaagtaaaaagagagagatctaatgacctgcaaggcgaagatgaagctcttgccgtgttccatggaaacctcgtcgaatgtcatggcacaatgttcgataaaagaactactataacgttaatatcaggttattttgtttggtttggtgggaaaagcaacacaggtggatcaaattcaagagctgaagagagagtgagtcacaaagaagaagacaacacagtcaaattccaaagacaatatatcactcctttcattacatccgaaaatctcccaacacaattaactgattaagaattattatgttctctgttgtaacggaaacggcaatttaacttcaaaagacatccatgcccttcgctttcttattccatttttatatgaactggtcctgactggtcctacattataaacaacatcttatttacacatgtatcaataccatgtttatatttataaacatacatactatatgataaattatgtcatttttaaatctcaacttttaatttctttagttaactactatattttcccactttagaaataaacaaattaagtcttattttaaagcgggtgcaaagatacagaaaatgaaaaagaaaaaaaaagttagggaatatgctctgctctcaactaaaggcaaggcacctaaagattctaatctttcatgaggcattattctgttgtccaagtttttatctccatctccgttcttttttttgttcgttttttctctatcaagccccataccataaggtaacattgttttattattttattagaggaagaaggcgaggcgagggcccaaaaagtatagtcaaaagaaagaacgaaaatccaaatccaaccaatcagacacttttcccacttaataactcaatacatctaatcttgctttcatcctcttctcaaccttttctttttttctt

SEQ ID NO: 3807 - DNA, 1191 bp, Glycine max
aggacacaagtgaagagctgcgggcagaagcaaagatgtgggagatgaacgcccggaagctaatgggtgatttggacatgttgaggacagaattctcagatcaatccaaaaaaatggctggtatagaaatggacctttcagcagcacaggtagagcgtgatggtttgaaaaaagaagcggaacagttaaaattgtcgtttgaggatccaatagtgagacagaaagcattggaagattcaatgtctcaagttgaaggtattccagaaattgaaaatgctctaaaagaggaactgaagttcgaaaaagaatccaatgccaacttgtctttgcaactgaagaggagccaagaagcaaatatagagcttgtttctgttctccaggagctggaagacaccatagaacagcagaaagttgagatagaaaatctttcatcattaccctcaaaattcagtgatctagataaatctttccaacaaagtatagaaggaaacaagcacttaatgcaacaactagaacaattggaggaatcgaagaaaaatctgctgatcaaggtgcaagagctggaagggaccttagaggataaaatgcgaggcactgaacatgcaaagattcaaaacaacagaacactttcagatattgaaatggagtctgaaagcaaattatctgctaaagataaagaaatttcaagtttgaaagcaaagctatttgattctatccccgaaagttgtaataatgcggagactgtgtccagaaacttagacgatgcagatcttttgagagaaatcgaagcactgaaagagaaagttcaggaacttgagatggactgcaatgagctgacagacgaaaaccttgagctcgttttcaagctaaaagaagcaaagaaaaattcgaaagatggtggtgcatctgaagaccttttgtcagacaagcttaaagatcaaacttctactagctttgggtctgaggtaagcaacaatttatttcgaatattccattcagaagacatgctccaggggaaaaaggacatcaagattagtaatgatgatcatttttcaattcaagagcttgagacttcaaagttagctctagaagttcgaatcacagatttgaataaggaactgactaataaaacatctgtgataggaaatcttgaggctaatttatcaggtaaagaaaaggagattggggttc

SEQ ID NO: 3808 - DNA, 1165 bp, Glycine max
accagcaggcttcaaatcatcatcaccaatagaacgagtaacctgtgtaaaacgagttggttttacttgcatcaatatatagtaaaacctcaaatttccattaatatcattgttagtgcctgatcatattattttgtgaacacaagattatttgtgtgccaaaagctaaaacaaagggaacaagaaagaaaaaaggacagacattattgaaccaattggggatcgttatgtatcagaccagtaatgactagagatagctcccctctataagtaataccagaatgcgtgactcaagcattagaagcaaaacctaaaagcaattaattatacaatttattttcagaaggcactcctgacactgttccaactaccatcaggaaactagttgttgagaatcaggaacaaatgtcagtcattaaaaattgatttggtaggatctgatttagggaaaacttaatctcctaattatgtgtaactattactatctgtctatataaacgagcatcctgccgtgtacacaattttcactcaacttccctctgtttctcttattttacactagtcaaatgtaccagtgacactttcaagacctttaggtacactccatgctcagatgtgcacttaatgaagcctatttggctaagaaagctgtcaatttttttgttccaagcccttggagcttgcttaagaccatatattgcctttctcaatctgtataccttttcttcttgtcccaatttctcaaagagtggctggtccacataaacctcctcatctagctgtccatttaagaaagcagacttcacatctagtttatgcatagaccaaccttttatatttgcaattgctaccaccaatctcactgtttctattcttgccacaggtgcatagacctcaccatagtcaactccaggttttcataagaacccttttgccacaagtctggcctcatttggatttcaccttcactttataaacccacttcagtgctatgggtttcttgtcaagaggcagattaacaagttcccatgttgaattcttctcaatagaattcaactcttcttccattgcattgatccatttggggtaatgcattgcttccttaaagcttattaaatcagatttaaaaaaacagtgcataatgcaccaattccccttcagaatc

SEQ ID NO: 3809 - DNA, 1252 bp, Glycine max
ggccagcttgcatgcctgcaggagaagtatcgcaaaacttaagagtgaaggaaaaagcagtgttgttcagtttttcaccttctcttattttaagcctagctttcacataattaacttttctttccaaaactcaagtttatgatttgaaaaactatgtcctctttgatgctttataagaccatatagattttcttgcctagaacagtggtcaataatttggaactatagtgactttgctgctgtataaatttatatttaatatagaattatcaattttcttattgcatctcaaatctcaatgcctacctattcctcctcatgcaggacatgaagcggcaatgtgatgaaaaaaggtttgtatttacacaactgctattgttttttctcatcattatgtgatgtttcctgaatctgttttattgccttcagagatgtttatgaatacatgattgcccaacagaaagagaaaggaaagtcaaaaagtgctaaaggtgaaagtttcacgctacagcagttgcaagcagctcatgctgaatatgaagacgaagcaaaactttgtgcctttcggttaaaatcgctgaagcaaggccagtcacgcagtctcctaacacaagcagcgcgtcaccatgctgctcaggttttcttgaactatgacctttctcattcaaatcttttatcatttcttcagcctagtcttgatgcatctttgttcttgttcttctttcaatatagttgaatttcttccggaaaggacttaaatcactagaggctgttgacccacatgttaggatgattgctgaacgacaacatattgattaccaattcagtggcctggaggatgatggaggtgaaaatgataataatgatgatgggaatgattttgacgtcattgaaggtggtgagttgagttttgactacagggcaaataagcaagggccatatattgtttccacatcaccgaactcagcagaggtaggaaatttgtattactcaaaacttgaatggttttcaaagcctgggtgcatattgaactttattcttattgctcatttgcttttttatttaaaatattaccaaactttgtcacagttgtcattttatacttgttgcagtctatagctcgctacaaattaaaaacattccattgttgttttcataatctgaactataaattcatcttatcataatcattggcaatgttttgccaggtggaagaatcaggccgttcatatattcgagcttcaaccccaga

SEQ ID NO: 3810 - DNA, 1232 bp, Glycine max
tgaataagcgttaactcttggaagcagacagtgctccaagtacaccatataagcaaacgactcaataaagaagcaaggaaacagttataaccctaaaacccaaggtatggcctccaacatgacgttctactccaaataactaaatcttttatcagaactagttacaaactaacaattccaaaagcttaagctgttaaggtttagacaaataaatagttttatattacacctctaagacaccgccttgcacaaaaaccttttaaagctttagatcatgttttactcagtttttcttatctcatttctagtattttgataccatgtccaattttctgcattattgcacccatgtaaagttttaaagcaaactcttttgtttcttacctagtcttgaaaactttcattctgccaccagcactctttatcttggtccaaaaccttttaattcactcaggactactcaggcaagtgatagcagctctgggcttcgagggccagaatcctccgaagaattcaagagaagagggaaacaattgagagaaaaggtaatttcattcatgtcttgccttattacattcatcatatatatagtggtatgaagaataacagaatttgtcatcttctgctagcataatcctaacagaaaggaatctacggcactaatggcagacaaagctaagggaatggccagctcagcgcatcacacgaaatcctttaggtatgctggtgctatgtttttccttttgggcatgtttactatatgcacctccttcttgctatcagcaagcttccaaatcttcttagacgtctcattccaaattaatagagttgagagaatatgagaaaagagaagagaatgagattgagaaatcaaatgttattcaacccaagtcacaactgattacagttatagattatatagatgatctaacaactaacaacctaaccgtcaactaacctaagttagttgatacaactgtcaccagctgttacacactaataacctctaatcacaaactaactactaaccatagtagttagactaacagcttactgaaataaagcaaaaatacattgagtaatgtaatactcttatacccccctgcaagctcaccagggattggaagaaattctttgaactactctgagcttggatctgaatgaaacaaatgaagcaggagagagggccttggtcagaatatcagcaagttgatgtgctgcaggcaatgcaa

SEQ ID NO: 3811 - DNA, 1239 bp, Glycine max
agccgccattataatgctgattagagatttcatgagcaaagattggtccctctctttccttcttatcttgagagagagggaaatagtgttgcagatagcttggctgagttaggttcttctcaagataatagctggcatggattgcttttaataactgctcatctagctcaaggattcatcttaatgtggatgttgctggaactcagttctaaaaactgagatagcttgctagtttcttgttttctttgttcttttgtcttttatatttctgaagcataaaaaaaaagtcacatattatttatgttgatggtcttgattaacctttatataatatataatttatttttttaatttttgaaaaaaaataaatacacttatttacaagtcatataaaggttagttcagacaataatgattaactcttattagttgagcaaaacagtatggataagttattataaattttataggtatatgtctttaatttttatgaataaaaaaattaaaataataataatttctcatatagtttgtcttagaataatttcatcggttaaagagaaaattttagttcttattatttttcttttgtattctttcgatttctctttatgcaaaaataactgaatagccttttcagtcgttctatggattcgatttagaaaagaaaaaaaaatgcagttaaacaacaatttttttactctacagcctctgtctctccataattattagagttctaatatgccgatatgcatacatcatttcctaagtgtgggcttcaatgatcaaaaggaaaataagaaaggaaataggagaaagagaaaaataaataaataaacaaaaagattggtagcggaaataattaatcatagcttaaataatgtagattatttattagtagaaatttcacttagaatacaaacgactttagtgaggctgcgacaaggaagaccaagaagcctttcaagtttcagcgcatcacaacagtaatagtaaccaagtatgaacgaaatgttcgttggctaattggcacgtgccgggcacaaatactgaaatacacagaataatgatgaatgacgaatatagcaataggaagctacacattataagtgtttgatttaatagcagacgaatcccttgggaacaccctttccacagtagtttagaagcaagctcaagttcactggaacattgaggttgatgcccaacacattagccttgagagcagtgcaaaggcac

SEQ ID NO: 3812 - DNA, 983 bp, Glycine max
agctatacaaaacaaatataaaagccaatctcaagtttcttatcccgaccccttcttccatgatatacaccagaccaaacatttcataccattttggaacaacgggcttctccatgactacaaattcccccataagacttcattctcaataaatttagttacagggacatagcaattgacatctcaaattaattctgctcagtctgatttacttgttaaaatacaatttttatttggagaaattagaatcaagtttttttgtttttcaagggcaaaacaacctgacaactaaacataaaaaattagtcccgcatactatgtaaatttaatttcaacatatctagtatataaatttttcactattttgaactatgtatgcaaacaggtcaaaccaagccaatctttatggcttacatgtttaaaaaatataagacgtggtttagattatatgtcacgtttttgagtctgtcttgacttttactaaaaaggttaaaagaacaatttctaaatcaaaacgatttatacacgcaaaggagaactatagaccatgattagttcatattgcataaaaggatgataatcaatattgttggatgtttggaagatgatctgtacaaaaataacggcaaattcttatccacgctcagtacatcatagtacctaaaatctcaataatactgtgctttcatgcaatccctgtatcccatgttccatctatatatatatccactatatagaaaagaaaggccattgatcgaacaaagttcctggccacggaataatatctcttacaatcatcacactaacttttaaatagaaagatcattatttataaacagcacaaaacaaaaacacaataaggattaaaatgacaaataaattgttaataacacttctagtcatcatttgtttccagttgtctgtagactcatctctttgaacgttcccttccacatggcatgattttgaagaaaacaccactt

SEQ ID NO: 3813 - DNA, 1344 bp, Glycine max
  misc_feature (1313)..(1313): n is a, c, g, or t
  misc_feature (1324)..(1324): n is a, c, g, or t
  misc_feature (1332)..(1332): n is a, c, g, or t
ttgcatgcctgcagaacgaagaagtaaggttatcagcttgaatttttgtttaattattatataaagatgcttcaaagacatcagagacaatcaagtctgatgaaagtttgggagtccatcttgcatggcctccagatatatccctttagtcctgaacttctaaaagatgtggtggaggttggccattattacactacatctaataaattgcggcggattctagatgactgtagttacaagtacgttccttgtccatatagcttctgattttgtcaaagaatgtcatggtttgatttgacagaaatttcaagacaaaataataatggaagagtttaaacttgaaagattttaaaatgatttcttaccagggtcaacaagaacaagttgattctcatttctcagggaagatgtagaccattgatgaaaatctgtaacttttatcctacaagtgaattcaagtttaaagttaatctgatgttactaatgtgatgtatgtttcgaaattataaaaaaatgacatctgcttcaaaaactattctaggattttgatgggaaatataaagtgaagctagtgaagctttttttctgtcatattttgttttgatcccaaaggaagtggaaccccttccaaggtagtctgctttcgcttcccaacatttgatgaaaatgaaaaataaggttcgttaataattttttttagttttttccttctaagcattaccgtgatgttgcaaaaagtgcaagtggagtgaaaactctagaaggttttgcacatcaagaagagaaatgaaatgtcgtagcttcataaataagaagttctgtttctgaaattaattgacccctatctgttacagcttttcttcccctctccccttgttttaggttctaagtcatctgtttctccttctcttttaatggcagtaatattttctttgttctacggatatacaaatctcttcttttatgaaataaatattgtattttatatcctcttatttaaggatgcatatttcccttttattactattacagtttcacgtgttttttgtttctgcacaaggacatgtatggtaatttcaaatgttctagttggtttatgcaaattttctctaatataaacttggcaataattttgcaggaaaccatctgtagttctctggctttttgcgttgtcatacgaaatgtttaaaggtggttcacaccacagaatccgtggattgttcgaaaaggcattgggtaacgacaggctttgcagctcagttttgctgtggcgttgctacattatgtttgagatggaaattgcacatatcttntgcggtcgatntagaggtnccaaggtacgag

SEQ ID NO: 3814 - DNA, 1211 bp, Glycine max
atcacttggaagaggttcccgactatgggccatccgggcgggcctggagggaggttcttcgggcctccgccggtggtggaccatcggcgccaccaccagcggaggaagagcaagcacaggcccagtagaataacgtctgttacctgcattgttagtagtgaagggtgtgagggaagagtggtgcatctgaagagattattatattatataagacgaaaaaggtggcacacagacatacataggacaccatgtgtgaatgagtttggtctaggatggttaagagtattgaataatttgggcagacgtaattactgccagtacggtgtattctggatcatgacaggtattcaacgacaagcagtgaatttcatgaggggccacctttcctttttcttttttttttttttaaatttctaaactaatattgtaatcttggtctcatagtaaaccgtcactcttcccattccaacaagttgattttttacaacattaaatcatatgccaccaaacgatgttcagtggtctttgttttatattgaccacagcagaggtttttttttttttaattttgtttttctacatagaacagaccacatttaaagtattaaattgatctaactaacctgacgcgttccagttgtaaatatacgtgcataaaatggataaaaacttatcactatttcatgtgaagttgttatataatgataggatttctgtgcttattttttaaaaaaactatatatattatataggtgaaatattatgaaagtgaaaaaagataaatctttttttcaaagcataagatgtataaaaagattctgtaaaaaaaattacaaaaagatagatattttcttgtaagaactttgcttctatgcatcactgcttttgtgtgaagtgtagctcttcaataaaatttcttttgcatataaaaaaatgtataaaaaatatatgaaaaaattcatttctctttctcaatacattctttttaatataattatactgtgtggtatttaatatattttatgtaaatcatattaaatagaaaagaaaactctcctcgtttaaagacttcagtctcacataaatttaatttaataatgaaatatatattatcagcttccatcacacaaaaattacaagtggggaacatttatgactttttttttaccatggtggcagtgatggaaaggtggtagttgagctattggata

SEQ ID NO: 3815 - DNA, 986 bp, Glycine max
acgccagtcttgcatgcctgcagtttgtgggcagagattacctacctctgtaggagacttctgtctcttggacagcaagtgaattgtatcgtgcgtcatttgcatttagtaatatatttcgtcaattaatctctggtgctctatcattttcaatccaatgggtcagatcaaaggagaattgtggccagcaaaccattaaccatggctagggcatctggcagtggatttataggatgaaaaaatcacggtgatgtataccagcattgataagatgatgtccaatgtggaggagaaaatagaaaatttaacagacagtcttctttttgaaagcaaaaatgcttgggcaagtgcagtgaagatgaacaagagagttataacagaagggagaagagttcgactgacaagggagcagatgaatatcgaatggcaatgaaggtgtaactgccatctttctgtggacaagaccctgttggatgaatcacaagggctgagacatactttgaagtacaaaatactcctgaggaagtgaagatcaagttatccaaattaagtatggaggggtctgccatctgttggtccaacttgttgagggaaactgaggatcctcttggaaaaactcaagaaggcaatggtgatcagatttggtggaagaagagaggaaatccctattaagcaatttggaagtgtagaaaatacattgaagcatttgaatttctgtcctctcaagtgaacagattgcctgaagaatagtaattggggtatttccatggaggcttgcaaccaaacatcaaatgaagggctcatatctttaaaccaaggacctgcttgaaggcaatggagttagcccaggatatagaagaaaaaatcaccacaactaccacaccaatcagtagttacaactttcagcctaaattttggcagcaaagcaatgtggaaagaatccgaaatggagtatgggggtgcaagaaggagaaaatgtttcattc

SEQ ID NO: 3816 - DNA, 1222 bp, Glycine max
aattaattattatctttatccccatatggacatatcatcatagatttggaaagtcagtcaagaaacagcacaaatctgaagatataaactaatcaatcgtcagaaatccctcccggcaattcatggtagaatagatagccaatctgtcccacatgcacaatatcttgacaaaaagttcgtgaagtacagttcttaaacttttaaaatgtacaatttcatattttctgtttatttttctgtcatcctctaaatgatttgagtacatggtgatttcatgactagtttagccaaaattatctttaaacctaaagtgcacgtttaacatattggtaaaccctccttcaagctcatggggtgggtcatagggcaaaagaacataatagtaattatattacaaatcaagtaatcaactatcacattctgaacttgccattttagaatccacaaaatctttttaaaagcctacttgaattacttctaggactattcttacttgatgtagaaggatcttgctttagacatgcgctaactggtaacaaaattctttaatatactccagcatgggagaaactggatgagtatggcattttttgttctaaggaatttatgttctctcagattgtgattatcaagttgctgtataacctgaaattcctatacctcaaaaggcacatgttaccctgttataatcaaaactaatatacaacatagccttacataactgttgcagctcgacacgtgaagcatagagccaaaaacaagggaatccataacaagaatgctactcttgccaaagagcagtctcttcaaaacaactcaaattcaactagctctcctgctgcattgcactctacatacttaacaccctttccctgggactgtggggtcatctctgaaactccaaattcacacaagtctggcagttctggtgggatagcgcaacgtattaacgcccaattaaggccttcgaagaaggggtgctgttttatctcagcagcccctttctctgaacccaaacggttttcaggctctttaaccaacaaccctctaatgagatccctcgcttggatactaacaaatggggtgtcagggaatctgagaccttgcaacaccacgttggctaatgtttcttcattattagaacctttaaagggtgttctaccatataaaagctcatatagaaaaacaccaaatgtccaccagtcaactgcaggcatgcaag

SEQ ID NO: 3817 - DNA, 1109 bp, Glycine max
gattcgccagcttgctgcctgagttattattaaagatacagtcaacaattagaacatgctctcccagtatttaagacgctcctttcaaaagagtaattaaccttccatttttgttgtgggttatgatactatgtgtgtgcttctgaagtagttgaatccaatgccaatggactttcaaatgaaagctataacataaggtgtgtttcttttaccgttttaacccgtcagcacgcattctgatgtaccttttttctgagaaacaacaaattgttatttctccacacacataacggcttttgcatttttgctttgaaaattgtaactttcctgtttaacatgtatccaagcacactctacatcattgaatccaacggtaaccaatagagtaccattgatgatgaacagccttatacaaacatccatcatatataaataacagaatcaaattaaagtcacttttagcatttgggccatctttagcattcaccctcgtgttcaactgaaaacgggatcaaaaaagtcaaaatgagcagagcagcaccatcatcgatgtccattgtctaggtctgttcctgccaattccattatatcacaatatctatcaaattttctcattagtggcacaagcttttgcagtgcacacatacaatataataattgaaacagccacgcattccgatggagctagctagaggactagtattcacaaataacatagcaaaccacttaactttttagttcaatttttcaacatgtgtggatcccagcaccagcctgtgtccaacgttcaaaaagccattcaaacttactcgagtaaattacggacatttcacacctttttcctcagtaaaatcagtatctaaaagtcactacccttttctccttcctccaaagacttgtaccattatctagcttctaatttctaaccatgcaaatgcagcttttatcatcaccattcaccatcttcaaactcctcatacttacattattattacaagtcattcccactctgacactctccccttgcaaaaccacatgggcagcattcccataaactacccctttggcctagaagatggatgtggtgcaccccagttcagacacatgct

SEQ ID NO: 3818 - DNA, 1223 bp, Glycine max
ttcattgctcctacaatcaacaaacacaatttttatttccaaaactcaaaaataccctcccactacactctacacgtgaacaaattatggtttcactccaggtaaatagtatatatacttgttatcaagggagatggaacatatcactgagagtttggcatttccgccaagtgattcttgtagtaagcgtgttaaacaggagtcgccgcgtggaatgtcttccttttttccagactgagatttgttagtcagagcatccactaaatgcctacacaccaatgaaatataacagtgtttaaaaatagaaaacaatcataatcatggacttggccattaattagtgacagatgcaactagctcagaagtacccagaccaggatactgtttttcaaagaataaaaaaatacctcagcaatatatggaattatctagcacagtaaaataagaagagtaatgtgttatttttatgtttcaacctacataacagcaaaacccatccaatcaggctgtagaaattttaattaagaagggtctgtttggcagaacttgtttacaacttattaaggcttatcttctgacataagcaattgtgtgagtattcaggacaacttatgaatatagctaataatgtgtccttaaattattttcagcttatttcaataaagtctccaagatagcttataaaaacaacttgcagcttatatgaaaattgttaatcctattttcttttcaattacagaattggaaacatcttatacataagcacttacatgataagcacttcaataagtacttaatttatatttttatttttttgtaggcttcaataagtacttaataacttgtttacccaaacacaccctaagaaataatttagtcattgcatcttacttgagctgagataatgatttatctacatgtctgctttcccttggacattggctacctccatcatcaacttcatccctatccaatccagcaagatcaataaggatgattctgctagtttttgaggtactgaaaccctttgtggttccctgcaacattagtttatgaaaatcatgtttaacaacagtttccatacacaactgctggtaatgttaggtagaattacaaaatttggcagtaccttacacaaagactcaatgacaaatgtgaaaattatatgtgatcttgagctattagaatttaagttcattgcttcgttttttctccttgaaagg

SEQ ID NO: 3819 - DNA, 1109 bp, Glycine max
  misc_feature (1099)..(1099): n is a, c, g, or t
aatacatcacattctttggctggcctaacaccaatgaaaaaagaagtgaaaaaaagataccccaacatgcgctatccatgagttggagaggtctttgcagagaaaatattaaaacttttctccaataaacaactgagctcacccttaatcaccatgggccatggcttcatcaagtttacaaagaatcaaaagaatcatgtaaagtaaattttgattatcaaaaaagaaataaagaaaaaaaatcaaatcagacgacaaccgtatcgctaaacttgcacatcaaccccggttttgttttgtgatcatcttgggaaatgccaatctaaaaccttgttagtaatggcaatccaccaaagctggtgcggggaagacaagacttgtttgtggctgttgctgttgttgtggttgttgatgttgttgttgcttggatgtgaaggcaaacttggattctctatgatcatcttctggggcaggaaggttgagatccaaatccaaattcaacacattccttttctttctggggtgatcttcttctggttccaaagccaaaggggtgaaggagagtgtggcgggggtggtggttccgaccggagcgcggtggcgtctcatgtgaccacccaatgcctgtcctgatgtgaattcagcaccacagatggagcactcgtgcaccttggacttgttgttgttgctgtacaaattcccctttgtattcaattgaagggaaaatggtgacttattggtcttcaattgaaactcttcctcatctgttgacaaaaggtgttgctgtttcttctctaggccaatagccatcaatgccttaggcttcttgtgactggccctgtggcctccaagtgcttgaaatgaagggtaggttctgttacatgtcttgcattcatagacatagtaccctgccctgctagaccccaaggtagcagcttccaagaattttctactgctgtacttggcggagttcatgccggcgtcctcctccgcgtgtttcggggattcccgtgattgcccttgagctagaaggatgaggcaattcgccatgtcctcctcttcatctgtgctgtcttgtaatcctgcaggacatgcaagncttggcgtaa

SEQ ID NO: 3820 - DNA, 1172 bp, Glycine max
aatacatcacattctctggcctaacaccaatgaaaaaaataaataaaagaagtgaaaaaagataccccaacatgcgctatccatgagttggagaggttttttcagagaacatattaaaacttttctccaataaacaaactgagctcacccttaataatcaccatggctcgatcaagtttacaaaggatcaaaagaatcatcatgtaatgtaaatttttgataaatgtatagatcaaaaaagaaaaaaaaaatcagatcatacgacaaatgtatggctaacttgcacattaaccccagtttcgtttggtgatcatcttgagaaatgccaatctaaaaccttgttagtaatgacaatcaaccaaagctggtacggggaagacaagacttgtttgttgctgttgtggctgttgttgtttttgttctggatgatgatgttgttgtggttgtttctgtccatgttgttgttgttgttgcttggatgcaaaggcaaacttggattctctatgatcatcttcaggggcaggaaggttgagatccaaatccaaattcaacacattccttttctttctggggtgatcttcttctggttccaaagccaacggggtgaaggagagtatggtggcgtgtgggggtggttccgaccggagcgcggtggcgtctcatgtggcctcccaatgcctgtcctgatgtgaattcagcaccacagatggaacactcatgcaccttggacttgttgttgttgttgctgctgctgctgtacaaattcccatttgtattcaattgaatggaaaatggtgacttattggtcttcaattgaaactcttcctcatctgatgacaaaagatgttgctgttttttcttttggccaatagccatcaatgccttaggcttcttgtgacttgccctgtggcctccaagtgcttgaaatgaagggaaggttctgttacatgtcttgcattcatagacatagtaccctgccctgctagaccccaaggtagcagcttccaagaatttcctactgttgtgcttggcgtagctcatgccggcgtcttcctcggcgtgtttcggggattcccgggattgtccttgtgctaaaaggatgaggcaattcgccatgtcctcctcttcatctgtgatgtacttgtaattctgcaggcatgcaagctggcgaa

SEQ ID NO: 3821 - DNA, 1107 bp, Glycine max
ctttgtggctcgtaatcggtttgctgtgctggagaagagcagcaatcaagtccttataaaaaatttgaagaatgatattgttaaaaagagtgtccttccgattgccactgatgctatattctatgcaggaacaggcaacttgctatgtaggtctgaggatagggttgttatatttgatcttcagcagaggattgttcttggtgaacttcagaccccgtttattaaatatgttgtctggtctgatgacatggaacatgttgctttactcagcaagcatgccattataattgctagcaagaaacttgtacaccaatgcactctccatgagactatccgtgtaaaaagtggagcttgggatgaaaatggtgttttcatttatacaacactaaatcacatcaaatattgtcttcccaatggagataatgggataataaagacattggacattccaatttatatcacaaaggtctctggcaacacaatcttctgcttggatagggatggaaagaacagatcaataattattgatgctactgaatatatttttaagctttccctcttgaagaaaagatatgatcatgtcatgaacatgataaggaactcacagctttgtgggcaggctatgattgcttatctacagcagaagggctttcctgaggttgcactgcattttgtgaaagatgagaaaattcggttcaatttggctttagagagtgggaacattcaaattgcagttgcttcagcaacagcaattgatgagaaagatcactggtaccgattaggggttgaggctcttcgccaaggcaatgctggtattgtagagtatgcataccagagaacaaaaaattttgagagattgtctttcctttatcttgtcactggtaacatggagaaactgtccaagatgttgaaaattgctgaagtcaagaatgatgtgatgggccagtttcacaatgccctatatatgggtgatgttcgagaacgtgtcaagatattggaaaatgtgggccatttgccacttgcttacatcactgcatcagtccatgggctacatgatgttgcagagcggcttgcaactgaactgggagataatgttccatcgttgcg

SEQ ID NO: 3822 - DNA, 1237 bp, Glycine max
ataaaatatcagaattggaatgacatcttcaaaaaataagatgaggtccaaaatataatatagttatattaagtgccttatattgacaaaagtatgcaaatagttatatcactcatgtaacaattctttaccactctgtgcagttcctgtgacaatgcgtgactttagatcccccttcataatctgatgttacaggcctgccatcaaggtaatgcaccatagggccagaagcctgtattttggattacaaaatgtaagttccagtctaattatagtgatgagtgatgacaagagaagcaagtaaacaacattacctctgattcttctgatgagagacagaaaatgcattgataatttgtgacaagattctcacatttccttaaagctgtttgatccatcaagggacaatgtttctcttttgatgtatcattcaaatccctgacatcaggaccttgatgaatactttcaataggtagaatttcttcaatgtttttagtcttagagatacaagccggggaaagttttcgccttttagtagtttccaattctttactgcaatatatagtttttctggaatacttgcttttgcattgcctcctattagagtccttcccgttattatctgttcgcagactgaaaatggatgaatcagaaccagcaaactcattcatttgattgatattttgttttccagatattttcatctggctttttccagaaatttcctgagcataatgcttctcattttcttgtttacatggcgaaatatctatattcttagccttcttcatttcaccaatgctttgaactcctaatgtattggggactgtacaagcagttataggcgttggaattggactggtattgaaacaaaccctcttgcctcttctactacccttccccagattagaagaattgtccaatgcttgttcctgagtaacctcaacatacatttcatcaaatgaattttttggttccccaatctgctcttgtttatttttatctctagccttccttctttttgtagacttctttattccatttagatcatcagaacttctgatttgaggaaaacatacactcggaggtacaggtacttcatcagccattctatttccttctttgggattctcaaattccatgttgtcagcatcaactcttggcagatttgcctccagctctagtgaggaagccaccaattcctcttgattttcatcatcctcataagtatccatga

SEQ ID NO: 3823 - DNA, 1114 bp, Glycine max
  misc_feature (1093)..(1093): n is a, c, g, or t
aaaatgaccgaattcctccacttgagacactaaaatctataaatccttcttctgactcttcacttgaagtagtttttgtggatagacgtagcgatcctagcttaagagaactgcaaaacagagtacaagacatttcttgttgctgcatagaaacaactgatgttgtagaccagcttgcgaagctggtttgcaattgtatggggtgagtctccttggcattattggctttgaactatttagcttgcactagtctaactatgttttattgttgtaacaaggggttcagcttctgtatgggaagatgatctttttcctatatggagggagcgcattaatgatctaagagattgcttaggatctgttgttgtaccaattggcagtctatctactggactttgcaggcatcgtgctgtattattcaaagtaatacttgaattctatgtgatggtcaaggctgtgattatgcattttgactatattattattatctttttaatgggagtggtggtggtggaggaatttcagtggtttaatacaagataaggtctttgtgttgtttttgtgatgacatgctttattcatgatatattcaggtactagctgacaccattgatttgccttgtcgaattgctaagggctgtaaatattgttcaagagatgatgcctcctcatgtcttgttcgatttggacttgacaggtatttgttttgttgcttagcacatctgctattctgtttacaagtaggactgcaatttaaagagttgttttcccatgggctgtgaactgtgaccatgaaatgatgaagtgtaaaattatgaatatgttgtagtcttgcagttaacattctgtaaactgacatctgtctgaaaccatataattacagggaatacatggttgatcttattgggaagccgggttgcttatgcgagcctgattccttgatcaatggtccatcctccatttcattttcttcacccttgcgctttccaagacataaaccagctgagcctaccattatttcaggtcactggccaaacaatatttctcagattgtatgtctgctgagcttgtctttgatagtagttcacaaggngggctagctgccccagatatt

SEQ ID NO: 3824 - DNA, 1098 bp, Glycine max
ttctgcacaacaggattgcccagtgacattgtggtggaagttgatgacatgacattccatctccacaaggtaagcctcaaaacacagagaatcaaaatttctaattctcacacacatgggtccatttccacttccagtaacgacaacattccgtacttcattctctgaaaaatttgtctctgatacctatttcagttccctctgatgtcaaaaagccgaaagctccaccttctaattacgcagcaagaggcagcgtctaactccactgtcccacagcagcagcagcagcagcaagaaacagaagatgaagacgaaatcgttgaagagcagtgtcacgtgaccttcacgggcttccccggtggctccgaggcgttcgagatggccgcaaaattctgttacggcgtcaagatcgacctgacgccgtccaatgtggcggcgctccggtgcgctggggagtttctcgaaatgaccgaggattactccgaggacaacctcgtttccaagacagagggctttctatcgcagcacgtgctcaagaacctcaaggactctgtcaagacgttgaaatcgtgtgactccttgatgcctatggcggaaaatctcggaatcacgcagaggtgcgttgattctgttgtttccagagcttcctcagcggatcctgcattgttcggctggccggtcagcgacgctacttctgtgtccaaacaggttctctggaatggactcgacggtgacggaagaagaaaggttggcgccggtgccggtgagtcttggtttgaagatctggcgcttctgcgtttgcctctgtttaaacgattgattcttgcgatgagaagtgcggagctgagtcctgagattattgagacttgcttgatgtattatgctaagaagtacattcctggagtttcgagatcgaataggaaaccgttaccgtcgtcgtcgtcttcttcctcctccgttgcgacggaggcggagcagaaggagcttctggagacggtggtttcgaatcttccgctggagaagacctcgaaggccgcgacggcgacgaggtttctcttcggattgttgcgagcggcgaacatactgaacgcttccgta

SEQ ID NO: 3825 - DNA, 1184 bp, Glycine max
cacccatcatagcattagcatatgtggagccatgtatctacgcctgtgtctatctatttatgctaatcaaacatttcaaaaaggaacattggatcaacccaatataaaaatattccagcttataccagaacaaagatgcaataggatatgtctatatccacaattctatgacagaaaactgtgaagtcaaaattattctttgcatgtaccaaacaacatgaattgcacttatatggacacacacacacacacacaggtaattccataagaaatggaaacactgaagtttcctaaaccatcaatcaagtaagctttgattcagccatttctacttaagcattcatttgaaatttaacaaattcagattaagttttctaccaattcttgtgattgtatcagaaagtaagaatcaaaattcaatttcagaatacccaagaaatcaacagcaaatcttcaactaggaaaagagaaataaatagtcatgcttagagaatattacttgttacagggataaatttctgacatgtcttcaccacaaagttatcagataagtcagactcatcttcttcactggcaaatagctattcataaaacaataaacatgctgtaattaaaaccagtccatagaactgtgaataccacaacaagaagtatgaacctcctaatatgttgttagggagataaaaccattcaggtgtttccatctaaaattttaatcttttagatgattcattgttgatatcatatataagcctctttgactaggtagtcaagagtttgatcctcgtgactatcattccttcataattaaactgaatttcaatggtaataaaatgggcatattcattatcctgctttgagcacaaattagcatgatgacgatgttaagtatataaatatccatgtggttccacctaatatgttaagcttttaactaaggatcttgtttccttgacaaacatgaacatgggtggtgttgtatcaaccaatatgaggaatgtaaatattggaaattgtgaatcttcaccttaaatgatgagaagagtaaaattgcagccaagagaaggttgactgcctcaaatctctaaacatcatcataataaacaagatgatcagtaaaaaagtataaaacttaccagaaaaaaagtaaaatacggaaagaaataatcttcattataaacaca

SEQ ID NO: 3826 - DNA, 1121 bp, Glycine max
ggagaatgacttgaaggcaaaagaaacaagatgtgcccaggatactgaactcagtcacagcaaaagaataaacaggcagcatcaacagaccatacaactgcttgaacaagaaaaagctgagttccagacaaaagcccaagtccttgaagaagaattgaagctgatcaaggaacaaaagagaaatcaagtttcaaagttaaacaggaaaattttacctgttcacgatgatctgaaggcctcaaaagttagtgctctttttcattaatggcatggaacattgtgatgacaatactagtaattttctttctatgatttagcagaaccctgtggtgaaaaataccattcaatatcgcagtaataggagaaagtcattaaagaatgacagagaagtcatgaaagatcagcaggaccctggttacagcatcaaacatcagagtgaggtaatatgttttgaatatggactatattgtaatttacctccgtgtcaaatgttacaaagtatattttataattacaatttgtgtggtgcaaagtgataatataaaataaatgtagtctaactggaaatgacaccttactttacaatgtttctgtttcatgtctcctttttcttaaataggtagaaactgaacttggacttcttgatgaaaatgttcatgctgttgaagtagatccactaccaaagactcaattggttgagaatgaactagcaaaagaaaaagaagtcaagaacatttatgaagttcagttcgacaggttagaggaacatactgtaccttcaaagctaaaaggaaaaggcttttaatctgtttatataacccccttatgctgattcttttattagtttgaagctttcttcttctattgtgaacaatccaataacaacaaaagttgtcttcccacgaggtgggttattttaaatcatttgaaaggataattccaatgtcttgaaagacaatatgtttcaaaattgaatatgttcatcacattggttgctttacagattaatatcaaagatgtagtagttactctgctgctaattttggaagcctttttttttttgcacgtgccttattgctcatatgaagtaatttgtgttacataactccttgtatatttat

SEQ ID NO: 3827 - DNA, 1159 bp, Glycine max
ttcagaaaatggtgcaagcgataagaacgcgaatcgaggactccctcagcgaaggaaggttggttctcaaaatctctgcatctctaaagggatcaagtttggaaatgtattcaagtacatagtcagagaaaggaatagaggcttgtggccagtgcagccactcaaaatatggatcatccagccactcaggtaggcaaaaaccatggtcaatgggaacaaggtcagcaactccatcaacatagccactattgttgtggtcatgtttcatcacaagcatattcccagcatttctatcaaggttcataatcctaatgtctaggatcccaatttggtggactgaagaaacttggaagaaagaagggcccaattctcctgcatcaaaatcatgaccaacgaagcgttggagtgacgcaattttaggcatgtgagaaatagtggccgttgcaccaaagaacgcagcatgagagaatttgactaaagcagtaggaggcacaccagcaaggcctccatggtcaagaagataagcagctaactctcggataccggtttcaccgattcgaatcgatttctttaggccgggttggcccagcatttgaccccctaagccctttgggttgttcaaggctaaaggctcttcatccactggctttgctacagcaatgttgttaccgttttggttggggaaaacataggcaccacctaggccacttgggaggggtataggatgaacacctgaggccatggctatggcaacctcaacaactagagcatgcactggaggagcttcacttccaccaacaatctcaacccttggatgagaagaagacgtgaagtcttcccctcctagcattgtagttagggggaggcatggagtggagaaactgcggtgaatgttttccgcttgaaatgctaatccaaaggagtttgaagaagaagaaagagcaccaccagtttggctaagttcaatgatgttaggatcaaggtgaccataggattggagcttgcacctctgtgttcggctaaatggcttaaatccatgatgttggtcaatgctcacaaccattttttaacaatctcattcagataatggcagcagcgcattccaccaaatcacctcaaagtggttttctcaaggcgatggcttctgcaagcatgcaag

SEQ ID NO: 3828 - DNA, 1286 bp, Glycine max
aaaagttttcttagcgggggtatgtctattataatttctttctcctgcactttctttttaacatgcaaactgcatttattttatggtggatattggaaaaccattaatactctggattcaggagggctagaaccacatacttctcaccgtgaaggatggcagtccgtgcaagaatttcatgtttctgtttggacggtgataaatttggatggcaatattctgcctctcacagaaatttggaattgagtgcaaacttgttattttttcattccatctgttatgaaagcgttcaaatgaaaatttacaaagcatattgtaaacaagttttcctcaataaataactatgttagattgcaagtcagtgaattataataatttcaattttcaacgcatacaaggaaaacataatgttttatgaacatgagcatgtgagacaattttgagtatttgatcttagtacgatttatttgagccacttttgaggctgcaccttatgcagaataatgtctttatatagttcttatttaaattttttctgctcagtaaacattagtatctgttctttttctttctttatcatctttaacataatgaaaccggttccactgtagggaaaaaccgtcaaagttcctacttttcttgtgcctgctacacaaaaggtctgttaaggtgcactatttctattcaagatatgggtgttgttacctgtttcataagtgttaaccacctaagtcgtcaaattttcaggtttggatggacttatacacacttgaggtacctgactcaggtggcaagacttgttcgatgatttttgaagaagctggctgtgatcctcctgctagtcctagttgtgctgcatgtatgggtggtccaagagacacatatggacgtttaaatgaaccccaggtatacttacacttttttagaatcaaacatacccttaatcataaaatattgcttaaaaagaaaatcttagtttgtagctaaaatatgttgggacttgggaattaactgacattaaaaaagaatggacttaagttccagttaacacactgcccttctcagctaactcaaattcctttgtaacaccaagttcttattttctggagcgataatatagttagagtcttatagataaatgtaacaccaagttgtgttattgttttccttttgatgtaactgatgaaaggactgtcaatgcaggtctgtgtctcaacaacaaatcgaaatttccctggtcggatggggcacatggaaggccagatatatctgcttccccctatact

SEQ ID NO: 3829 - DNA, 978 bp, Glycine max
atgcatctctgcctctgaatatatataaatatattttcactgctatgccgaaaaacctttgatcccaccagccaccactctctctctccgatggccactgttacttcttctttctctttctccactctcactcaatcttcttcgccgaggaacctctccacactctcttccaattcaccaacttttcgcatccgcgttggtttctcctgtcactatgttggagttcgagcttccaattccgcttccaaaatagtcgttcgatgctcctctgccgtcgcaggtttgtttggttccccactgagtgtgggggacaaaagggtacaactttataagtgtttttagctcttttcaactttctgagaaatgggtagttttcaatttttgttttttttttaaggtttggagtttaaaaaattgatattttgattgtggatgtatggctgtcaaatttttatgtctgtttttgaaatttggtgttgcaacttgatttttgagtgagaatttgttttatggggataatgtttcaattggaagtgtggttgatgaggtttgatttgaaccttgttttacagtttcttttgtaatcaattgatgtagttgcttgtggctctatgtacaattgacttgaaaattctcttgatcgatgctaccttgttctgttagtgatgaaattttgtgtgaatgtggaactgaacttgttttgccgctctttcttgcaaaattgaatgtagtttaaattttaatattatcatcatgtgatttggtttttaatttgaagatactgttagaattacatgttgagggcttaattctgttagtgagcatgtgatgtagtgtgtgtgtcaaatggtgtgaattgttccaaattgggttccttttattgttgtaagattcatagtgccaaatgggcaaaagaaataaaagatgaaatggaatcttgttatcaaaagttggttatgggttgtctacatacttgat

SEQ ID NO: 3830 - DNA, 961 bp, Glycine max
gttattttagtttttggtaatccaaaatccatgcaaagatcccatttacgatgttgaagtatcaccgcactgttcttatggtgttaaaagttaaaaccagggctggaagtggaacccatattgttgaggaagagcacttttcatcatttcatgcacctgaagagattcccatagggttacaggctacttctgtctcatcttctttgttattttcaatagtacgtcatcatatacgtgattgctgcaacaaatttgtagcactaaccagtgataccactcgtctttcacgtgtccataaatggaattgtcaacacaactctttctagtttctagaatattaacaaataacaattttataaatatattaccacattaaagaggttagtgggaagatttattgcaagcctaaaactgaagggaacttggggatctggtctccagtccaaaatattacacagcacaattcagggtattgacaagtatcgaccccgtgagttgaatataaccattataattaaattcaatatggttgttaggtgaaaagagatagatgttgaggagagaaataataaagatataaataaaaaaaaagtaaaaataggtgagaaataaaatgatatgtaaagtttaattaaagagaaatagaaaaaagatgagtaaaaaaaagtaagaaataaaacaaatggattccaccatttttaaatttatttccaccttgtttctcctccaccaaacacccaaatattattttcatccttctaatattattttcatctatcaaaccaaacacagcgttgaggctatcaaaactcccaaggccgctcacctcataaaaaccttttctgatccattccattttaaaaattgcattctccacgcaaaatcccagcacttaaagcatacaaagttaatatgtgtaggtttccttaaaccccagtttttaccagcttcaataagacaa

SEQ ID NO: 3831 - DNA, 947 bp, Glycine max
ttgcatgctctgtcgcagccaccgcgaaaccgcttctgtcactgtggtttatgcttctgctaccgtcgtttcttcggatcgccgtcgcttaccgacccggcgacatcgttcccatgagctgcatgggtcaataccactccgttcgttctcatttcccctttcactctctgcgattttctcttccttccatacgacgccgttgcatctctcactattttttctccttttgcgattgcagtcgcgaaccgtgtggcaggacctcattggccgccactgccccatcttcgccgtgaatcgcgaggtgtgaatcttctgaattcgttaaattaaggtttattttttcttaatttctatatgaattattatttgtgctgggaattggctttgtaggtgttgatgcccatacccaagcccacgggttacactggtgctgatgcttataaaatgtgagccttttttttttcttccagtgtaatgtgtttattgcgttgatctcatttttaatttgcttaatttgtaaggaaataaaggcctctttgttttatttattttttcaattttctcccttgaaaatctctcagaatgatttttagttttagcttaagctaatccaacacgaacatggcacgaagtaatttgaaggaaaaggtattcgactcaaatacatccatttcggatgctaattgcatgtacttgaggaggggggaagggggggggggggtatttgctgtttgtacttaatgtgactctgctaaatgaagatttttgaggttttagattgcactggaggttgtggttttgtcgcaatttttgacattgtgggaaatgtgggcaaatgtgactgatgtggttgtagtgagccgaaaaacctcgatgatacagctgaaattgcaattgcagaccattttctaaaaccttgatttgataattatagttatagttgttct

SEQ ID NO: 3832 - DNA, 1110 bp, Glycine max
gctggcttttatttggctcgtttttttgaaaagaagagtctaatatcgtactttgcttttgttattcttggaagtttgatggttacatggtttgttctgcacaacttctgggatttaaatatttggatggcaggcatgtcccttaaatctttttgtaaactcataatagcaaattctgtcctggctatggctattcctggtttagctcttctacctttaaagctgacctttttatctgaggctggtttgataagccatgcattgctcttatgctacattgagaaccgatttttcaattactctagcatttactattatggatttgaggacgaggtgatgtatcctagctatatggttgtgatgacaactttattgggtttggctttggtgagaagtctatccgtggatcatcgaattggaggaaaagcagtttggattttgacttgcctcttttcttcaaagctggccatgttgtttatttcatcaaagtccgttgtgtgggtttcagcagttctcttgttggctgtttctcctccattgcttctttacaggtaattgtgacaatctttggaatttgccagtttgaaggggtcctacttaacctatatttcacctctagactttattgtcaaccttattataattcttgttgttggattttgtagggatagatcaaaaactactgctaggatgaaaccatggcaaggttatgttcatgcctgtgtggttgccttgtctgtatggttttgccgtgaaacaatttttgaagccctccagtggtggaatggaaggtctccttcagatggtttacttttgggcttctgcatactgttgactggattggcttgtgttccaattgttgctattcatttctctcatgttttggtatgcatatatatatatatatactatcctgtgtttttcattgtttattttgggagtggggatcatacaatatcgattgcaaatttttggtggtcacttgattcataaccaattagatattatttatggtcaaagtaatcaatcatatcttcctatttaatctgttgttaaagattgatcataaaccttttttttttctctctctacaggcatgcaagcttggcg

SEQ ID NO: 3833 - DNA, 1197 bp, Glycine max
tgatacgccagcttgctgcctgcagaacccttgcccgtgaacttaaaagtttctgagctattctatcttttgatgttactttctttcgcagcatggaagcgagactttgcttcttgtctctggcagacagtttatcttcattagttgcctccccatcttctccaagtgtggctgatcttgatgtagaagccaaagcagcatcccgtaaaacagcttcattgtgttcccgaactttagctagctttgcacgtttcagtgactgtttatcaatttctctcttctttgccacctcttgatctctttcacgaacatttttctctgcttgttttgctaactgctctactaaatcagtctttaaatccatattcatgccatctgaagagttctgattgagtggcctcccttcatcatctcgaggaatgatagatccatgaaatggacaaactttcagatctcttctctgacataatcctcctttcctcaaaggagtcaggcatggttggatctcaatttccttttcttcataaggcattgcatgaacattcaattcggcaattttatctgctggaataactgcatcattgtccaccctaccccagtgactttcaagctccaaaccccgctgattagccataaaaaccctgtttgaaccccagttatccaagtaagaactccatcgtaccacaggagcttcggcttgaagtttactccttggagtgtttgactcaacttcacgtcctcgatgaagcaggctgtctgtaccagaatcatcagactctttattgtgcaaaccaagattatcattactcattttatgggaagttgatgccacgccaagatgtttttttttattgttggatgcactagatgagatttccatagatacaacattaccctcctcccaaaaatcttcctcgtcatgttttgatgagtttaaaagagaacaaccagcctcttcacatttatttttaactgatttcagacgatttcggatatcaacaaactctttcaaaaaggaatctctgaatctattgtcggctacttcaactcttactagaacagaaatccactcttggatggaaaccaaatgctttgtgaccagaagtttgtatagctccctcaatgtatcaaaaactaccttgttatcactgtcctcataaactttctccccttctttcaatgcttcaagacgaagct

SEQ ID NO: 3834 - DNA, 984 bp, Glycine max
tgtcctgttcatttttcttgctttgagaatggtcattcacaatcacatcttcctctgttttattcacgtactctagaaacagtctttgtgggttctcaagcaaagatatgattgaagctaagctatgcttccacactcccaaaaattttctgagtgcattaacacgatagtcaagaaagacatcatgaagttcaatatggtcatcaatgttcattcgctttccattcccgaataacacaatatctccgaggccgtaaccaccatattcatgagactcatttttcctcacttgaactaaaacacgctttgcaacctcgagcacagcaacattagtcggagcacatgtcagagttctgcacttcaatttcaaaagacagaatagcatcaaaccaacggttttggtctttccagtgcctggaggtccccatattagcgtcacagagttttgatgacgccattcttcccttaggctaatgcaacttagaactgcatctctttgtgagtcattcaaatcagagttgcatattttgcctcttatttcagagtttaaaccattgtcaagccactcagcacaggtaccacattcctgccaattatatacatacggatgaaaacattgtaactgagcaagcaaagtagtaaataaaatcaaacagtgaccaaaaacacttgttttgcttttctctttaaaatatttcttacagaagaacggagttgaagaacttcatctatcatattcaggttccttgcttccagctcactgttgagtgatctccagattcttatatttgtggtcaggttagtaagataaaccgcgaatagaatatctttgttttggtcatgcacaccttgagccgctataagtttagatgataagacggtgatagagttattagaagcacgatgaacgaaggcaaaaacacaaggactgttcaaatcatcggtgcattttggtcgtagattggttacagcgatgaggtctcc

SEQ ID NO: 3835 - DNA, 971 bp, Glycine max
agcagctgctggttttgcaggtgccggttgacgaaccctcacaccaggtctttgctgtggtttcaagagacaatttgttagttcatgagagtatgcataaagaatgagaaggaaatgagataaagtcctcaaaggtagcatagcaaagaacaaaatatcctctcaatgaccaatcagcaattaattaatctaccaattaaaagttacaaatgaatatcaactgtataaaacttttaacaacatacaaacatagaaggaaatagtggaatcttcaaaagtatcatggcattataaaaaacagaataaacaaggataggcggcacaatccaatgccacatgatagaaagctgacaattgatattctagcatacttaagtcacactcgagcataatagcagacacaacatatgcataatcataatcaactacctgagcaggtcgaggagctggagtcgattgtgcagcaacaaattgcaaaatgtcatacattctagtctgaccataactgaaagctctttgccaatacgaaactgcaatatctcctgcccttgtccttagttccaacaagttgcgatcaatttctgtctcatgtttcgctacatatggtctgaagaaggagtcatacacatatgttgttccctaacacatcaatattaaattttactgtctcatgttaaagagaggcaacgaagaaagtaatatcagattttctaccattgtaagtaattttataccttagttttagggtaccacaagaatatgaaaaatgccaacttagcttcactgtacattgggacccttcatgaagaaatcaattcaaaaataagaaatcgtaaactttttattttattttattttcaataagcagatataagtataacattctctgaatacatgcaatttagagtcctctaccatgatataaaagtatcaccaaccctctcacatactgtcaaaaccgccaccaaaat

SEQ ID NO: 3836 - DNA, 1280 bp, Glycine max
ctccacgaaattttaaccacaaaaaacgtttttctactaaaagcagaattataagtataaagtaacaaagagaaatcatcagatcaataactgcaccaccccagaggatattggtcccttcatttttcagtgtaagctgaatcaaatttcattaaaatttgctaataatagtataagagtgttaagagttcaagctcatggaactgtgcaaatcaaaagaagaagaaaaaagccttcacttagttcttttaaattttttcctcacaattggttataccaaagagaacaaaagctttttcaacacacacttgcagttaaatctgagcagtcatgaaacatcatcaaaaaaattaaaactaattgcaacagggaaatctctctctactcatattactagcacaaaatacggctgagtttagatgtaaagaacaaatataaacttagtgtgtgtttggatgattgattacaaaatttagattaaaattgattttgaagtaatgcaaatgtgtgatttatattttaacatttatatttttaaagcaaattactagtaaaacttagcatattttttttatccaacacaataattgcatataattcttttaacttaaaattaattatggatgcaaaactaaatctttaatgtgaagtcaaatatgtaaatatttatctaaatttcggtgtctttcaagtgtatgataattagatttaaattgtagattagcatcgacagaagttcaagtattaactatgataccgaaaaaaattaaaaaataagaggaattctataatactatggaaaacttaaggattttaatttttttaaaccaaattggttaaattgagtttcaattcaatgaagctctctctcggtgtgaccaaaatcgtaagttatttgcccaaacaataactgtaccaaactgctttctccggctaccatatttatccacttttttaaaaaaaaataatggattggtggattgaaaagaatgtaggcaaagctcacgatgcatactacgaatcaaagatgcacgagtgattcaccagatacataacaaaatagtactgaattaaattccattgagcacatagtgaattgatactttgatcacatattataattaaattttataaaaacaaatacttaagatttataataaatcatttatattgttgattctagtgtagtcatggatccaggttctctactgattaaaacaaactgcatgaaattttaaccacagatttcagaacaattgcaccacccgacaggcatgcaa

SEQ ID NO: 3837 - DNA, 665 bp, Glycine max
  misc_feature (423)..(424): n is a, c, g, or t
  misc_feature (467)..(467): n is a, c, g, or t
  misc_feature (631)..(631): n is a, c, g, or t
aagtcgcaactcaaacagacaatctctcaccagatccccaaaacccaagcagacgctatctttgttattttcttatagctaatcttttctggtccacggaacactactcttgaagacataatgttaggatataagagtttgtcaagacatatagttagaatattaacgagttaattagttagaacctagaggggttatttagatataaatagaaagataggaggcgagatttagatttcttgtcattgtgattaagacctacctaaggagagcttcactaggaagagcatgagcagaattatagattaggcatattttatatttgaacttttgttaggcctcgtcatttgtattggactaaagtctctttcattagtttgcgtttgtttttgtgtgtgtgggctatttagttgtaggtgcatnnattagtgggcttagcttttgtgtgaggggtgccacttttaatnataagattttttgtttgggccaacagcaaatggggcattgataggctgtgggattcatagtaaaaaatggacaaaagtgtttgacttttggaatgaggttgactcatttttttttgtgaaatgaaagctttagggcctttatgaaatgaagcccaactaatgantggggttggcccctaccaactaaataagccccac

SEQ ID NO: 3838 - DNA, 976 bp, Glycine max
catgcttttgcagtttgtgaaaaatataaatatcttctttacaagaacaagacttcaagtaacacttaaaagcaaataacatgtacctgatctgttatttccattcccatgtagtttactccaattgtctctcctgctttgctaaagacaggttctacatatatcaagaatgtctttgacccaaataattctgtctcaaaagtaatttccttttttgcaggcaaccctttttccattacttccctcttgaaatcctgagattccttaacaccggatcctgtgaaaatttcaacatctgtttttcctatgatgtcctgaaaaaaaaatgagttagttttaagaatcaagatatctcagtatactccttttcataagaagttaaataactcataaataggaaagaagtttctactttaaagaagtttcttctgaagtatgtgcagattttgatttaaaaaataaaaataaattacaatgctacttaatcatatgaacttgcaataagaacttcaacaataatcattacctcctcttgtaaactcggaaaatgattgtagataaagcgatagcgcaactctttgtcctggaagaaaagtatcagagtcagtccttttctgattgaaagatcccttacaatggcagacatgtatttagctttcagaatgataaaacaattaaaactacaataaaggagttatagtacaagtactgcacaaaatatggaccatgcgttagaaggaaaacaatgtcatgcaattccaaagcattacagatttttatcaattaggtgacaagttcctatatttacgtttcgtgttttatcaatgtggtgacatgtcctatatttatgtttcacatgttaatgcaccaaccacctgatcccccaacataacacaagttttagataacagtttagtggcactgttcacatattctagccttttaaaaagacattttcaggcattattctgtgtcc

SEQ ID NO: 3839 - DNA, 1154 bp, Glycine max
tgattcgccagcttgctgcctgcgggcacatttctccatatcagaccacacctctcttttctgtaagcctcttattggttccctaacgaatgttgttaattacattgttgttctgactatttattcagcttcggttgtagccacggattcatgacagagattatcaactcatgcttagttcgaagactattttaactgttttagttttgagttcagaataaagcacgcagcagaggtatctatctcctcagcttaaagcttttcaattcatcactttgaatattatttttgtttttttagtgagctataacacaatcagacttgaaaaatagtatcttatagaaaagtcaattacaaattttcttgtgaaatataaccactaaatcacatgaaaaaaatatgtaataatcgagaattaaaaagttgagttttaggatttaaggttttatctccttttagaaataccagagccatacaattggtgtgcagtcttctccaatcttctatctttattacatttttattttgtttttctaattctttttttaactatttaattagttagctttattttgtttttcatttttttaattagttacatgacatatcacaaataactttaaaattgctgactgatatgatcgaccacatgatcacatttaactgcacaagcaaattgagttaggaaaagaattataatctgatatttctaaaattttagaaattaaatgcaaagaataaaattcaaaggactacatataaatttggtgtattttcagaataaaaaaacatatttaatccctctatataataatgaggtaggaacggggaagaattttcaaatattaatgtgaatacaattttctcctatagttcattatatttcgaccgtcttaatttgtccttactcttgaaaacttattaagctgaaatttttacctatatctaaatgcatggacaacatggctacttcacttcagaaatctcgaagtgcaaccaagaaattgcttgaagatttcacaaagaaacgaagactagaatcgccaaaagaacaagtccaaagtccaatgaaattaaaatttattattgtattgtgtgcctcaattagcacgtttgtatgtatgggagaatgggagccaacttggagcacaaga

SEQ ID NO: 3840 - DNA, 1066 bp, Glycine max
gtatggggcgattcaggaggtggaatctgcaatacaagagcttgaagggaacaatgaggggaatgtaatgttgacagaaactgttggacctgaacacatagccgaggttgttagccgttggactggtatacctgtgacaaggcttggccaaaacgataaagaaaggttgattggtcttgctgacagattgcaccagagagttgtggggcaagaccaagcagttaatgctgttgctgaagctgtgctgagatcaagagctgggcttggaagacctcagcaaccaactggttccttcttgttcttgggtccaactggtgttggcaagactgagctttcaaaggcacttgctgagcaactcttcgatgacgaaaatcaattggtgagaattgacatgtctgaatacatggaacaacactctgtttcgcggttgattggtgcaccaccagggtgtgtggattgacattttcacatttcagtttattgttagttttctgtatgaactacagataactgactcattgtttcgactttcaggtatgttggacatgaagaaggaggtcaactaactgaagctataaggcggaggccttatagtgtggtactctttgatgaagtggaaaaggcacacacatctgtgtttaacactctccttcaagtcttggatgatgggaggttaactgatggccaaggccgtactgtggacttccgaaacactgtcattatcatgacctccaaccttggtgcagagcatctcctcactggactttcaggaaaatcttcaatgcaagtagcccgtgatagagtgatgcaagaggtatgtctcttgacaccatttgtttaatatgtatgacaaaggtctttgtgctgtgttttgacttgtgaccttgtctgttgaatttgttgtaacaggtgaggaggcattttaggccagagttgttgaaccggctcgatgaaattgttgtatttgatcctctttcacacgagcaactaaggaaggtcacaaggttacaaatgaaggacgttgctagtcgtcttgctgagagaggaatagccattggcagtgacc

SEQ ID NO: 3841 - DNA, 1181 bp, Glycine max
ttggcttatgcatgattcttataggttgaaatggcttctgttttaacacgaagcaatatttaaaaaaaaaaaacatttttcctcatcttattacacttaaaatgtctagggttgtttagaaaattgttctgataatgctatgcttgaattcgttttaccatggtgaatagaagtcaccagtaggattctttgctttataattatcattgcttgcctgcaagcatcaaatctgaagtacaataaaaagatctttttgtgatggagtttttttaattatttcgagaaaggtaccatatcaattttgtccataatttgtggttggtttctgttaacattggaacaagaattgcattcaagttcctgcgtgagagtttatcccaataggccaatattaaattacataggggaaaggaaaatttgactatggaccattagaaacattttagcatgaaaagttgtttaaacattgatgttccagttttcatatactttcctttgtttatatatgtatatatgtatgatgtattatttgtatgattttgtcatttatgaatgagtaactttcttcttcctgccatttggttccgacttgtctctgttaatttttcatttttcacatgatcttgcagtcacaagggagggctacaactggagggagaatttcagatgaactcatattcgctttcatggataatatatgccaatctttccttgctaccatagagacattatcatctgttctagacgcctctgaggatattcttaactttcttgcatgtcaagcagaattactcctccagttgacaagaactgtctgtaaaagcctctccttacatgtatccctacttgttctgaaatgtgctagttcaggtcttaaactattgagtgcacttaagcctttaccttctgaggctaatctgatcatgaaacttttactcacattgctgctttcagtactacagtccgactcccttaatgcacattcagatggggcaactgatgagagttctggtgaggacttctcaaaggtttcaaatgcaaccctgggactactacccattctttgcaactgcattgcaacttctgagcattgcatgctatccctatcagttatggacttgatattgagacgcttcttgacacccaggacttggttacctgtcctgcaggtcgactctaga

SEQ ID NO: 3842 - DNA, 1422 bp, Glycine max
  misc_feature (1201)..(1201): n is a, c, g, or t
  misc_feature (1345)..(1345): n is a, c, g, or t
  misc_feature (1375)..(1375): n is a, c, g, or t
  misc_feature (1405)..(1405): n is a, c, g, or t
catgctctgcagccataatacccagaacatctcttccactcataatggcattaattatctgtcatcgacattactacttgttaacaaagttttacccaaaagtcacaatccctatatataccaaaaaaaaatcataaactaaagcccttgattatgattctttgataatcaatacacttatgatgacagcattagaaaacagaaagaatacactacccaacttttagaaagcaaatagagtctaaaaatgagagcatcacaaatcttaaaataagagttaaacacaaagaaactaaccattatgacacgtaaatcaggtaagtaaccctgtacagatattatatcactattaagaaaaattttaaagcctgattctttaactaatcaataacaaacagcatggggcttaaagccttgaacccagaccacaaggcttagcaagaagctggagctccagcagccaatgcaaaattaagaaatcacggtaatacgacatttatactcttaacaagaggtgcaattctacataagacagcacattcatatcttccctttactatgatatcccacttcctttctctcagctaatggatatggagaaagagggagagaatgtacaatctcaatcctcaacttccagataacttcagttcattttcaaaggaacaagagatggacattctcatttttctatccctttgaattttattttattttcaaacttcccctttagttattacctctctttgatttgcacggtaggaggaaatgccaaaaacattcaacctaacatcatcagcttcagaatcccattcaaattccccactccaattttccgcagcgctcgaagccgcattattggcctcgtttccagattccttacacgcttccagaatagcactcagctccgatttttctctcgtacaaacttctcttgcctctcgatcaaagcccttattttgtttctgcacagatacataattttcattttaaaattagtaacaacttcgtctgcacccatttggcgaacagagcctttgccaggaaccgcaaccgttcggttcatggccattaaacctattaaaccatctgagaagtgattgctgaggtgaaatgtgggagggagaagaaaggccaccatttgggacctgtacttgaagtcctccaaaccctcgatgtgtctgaagaaaggactccattnattaggactgtcatcggtataggtattccccgtattccaggaaaccagcgggggaacgtgtgaaggggccacgggccgaaaggcagaccccagtagaaggcacacccccaccggatctggctcgtgagactctcacggagtggnctgtgttcgtagcgtggcgtggccagtatnagtgagtgagtgcgtggccaatgccaatgncagctggcacagatgtg

SEQ ID NO: 3843 - DNA, 1170 bp, Glycine max
gtatttccaatctatttttcaccatttctgcatgacttttaccgatgctggagtcctcttcattctgatatgagggtatatggctttgctgatatattttatatcattaatgatttgatgctttcagtaacacttacttattttacctgactgcatcgaccaatctatgaatgtaggttttactatgccaaagtgcttttccggagatacttaaacaaatgatgaacaataagtcatatgatgatgcaggtgttaattctggtgaacttttggaaaacatggttgctaaagaaagtgtgagtttcatgaatgattcactgatgaagagagaggacataggcaaaggcttagtccatgatcactatgaacttctaggtgatattaatagcctactgagggatgctaaaaaaaataataatcaatcgcatgtagcagaaaatgcacataattctacctttcctgaaaatctaaaaaatttgcaaactggtaaactgcttcaaactatctccaatgcatttcgaggaaatgaccatccctttctgaaaagtgttactatgaatgatttaaattcattgatgtctgagtatgatagtcaatcagatacatttggaatgccttttctaccattaccaaaggatagtatgagatgtgaaggcatggttctgataacttctttgctctgctcttgcatacgaaatgtcaagttgcctcacttgaggagggcagctgtactcttgttgaaggcttctgccctatatattgatgatgaagatcgtttgcagcgtgttatcccttatgtgattgtgatgctttctgattcagcagcaattgtgcgttgtgctgctttggagactttgtgtgacattcttcccttagtgcgggattttcctcccagtgatgcaaaaatatttccagagtatattcttccaatgctttcaatgcttcctgatgatccagaggaaagtgtgaggatatgctatgccagcaatatagctaagctggcactgactgcttatggattcctgatacactcaatatgcttgagtgaggcaggtgtccttgatgaattgagttcaccacagaaaccattgacatcatccactcatagttctggaagattgaagaggataaatggcgatgcccaacttctgcaggcatgcaagctggcga

SEQ ID NO: 3844 - DNA, 1273 bp, Glycine max
gttacgccagcttgatgcctgagggcccatataatgttcttccatggattcttcatgggtattattttttttcacctcctaattagataatgaaaacacgagttgtgcaattttttcaccccaattaacataaaagaattatgattatattgtgttatttgattccactctcaaacaatacagtgaaactgtatttatattatgttttttttttgttttagaaaacttcacaatgaaaatacaattccattgtgttattcatccaataacacaacaaaatcataattttgttgtattgtttttgaaaacaaaaataaataacacaaaaaaagtataattctgttgtgttctgggttaagaattacaatggaatcattcttctataaacacaatgaaagttcgattttgttgtgattcttaacctaaaatacaacaaaatcatacttctgccaagtataaaaaatgaaaaaaccttacaaccaaaaagggaatagaaaggagaaatgagagggagacttgagaatggagaagatgacgaggatgagggagttgggtgcaaggtttggggaagagtgaaagggaaaggaaggcacatgagaggggaagtgagaagagagaagaagagaaagacgatgagggaaggggagggaggtgagaagaatgaggaagagggaagataaaggggtggagggtggggaaaaaaggctacaaaaggatacttttgtctattctcactacttgttaaaaaatggtagtggaaataataaacgtgattgtgggaatatccattcccattttacattaaggggatatagctacaattactaactagcctaaaacatagaaagctacgttggacgaggcccagttattaaatttgcgcctcgttaacctgggatcttcttcaatcataacaaaagaggttcaatgtaccctctccacaaaagaaaaatggctaaaatgtttttcgtttttataaacttgaaaaaatttgaattctctctttataaaatttttcatctgttttttattctcataaattataatatgtcaattttacaagaaaaaaatatatttttaccaatacaaaattaaatgagttacacaaatccccttcagatttacactttttacacatggaatggagtaaatttagtttacaaaaaggtacgctgctactccaacaaacaaccaatgaaatttagttcacaaaaagaggttgaagattaaattcgttgggagaaaggaagtgaaaatataaatcgggggcttt

SEQ ID NO: 3845 - DNA, 1102 bp, Glycine max
agcttgcatgccttcagctttgtggtttgcaaatatcatcatctaaaaccattagaggtgagtttgatgaggcatctagcatctaatctatgagtggtaccaagagaggtattctaaaatacctttttagaaggagaaagaaaatttgtcccatcaccttttattatttattttgtatataattgcttttataataatttatgatgcttctccaattacagcaaatattaatgattaaaaattttcacttaaaaaacatataaaaaatattaacgatgaaacaagtttttgttaattaagtagaggtacgcaattataaaatttcaaatgtttcgggacctaacaacttttacattttcaattaagatgacctatttaacgaaatcttgacataagtttaaatacgaatccgataaaaaatattttctcaataatttggacctaattataaacttctaaaaaccattatctacattgtttaattaataatgtttcacacaaataataatacttacatatcttaataaaggaattaaaagtttaaatcttgacgggtccatatatatatacacatacaaagggtgtatttatgattttcgataaaaaaaaataagttactaaaacaatttcatattaatatcataaaaaaaggttgtttgaggtttttttaatcaaagaatcatttattgtaaaaaataattaaggtttttatatgttaaaaaaagatttttatgtgtttgttgcaaaatttcaaaataatcagacactaaaaaaatatatatattacatgcaactagacacaatcctatttaaattgaatatgatcacgtgtgagatgataaaaatttatcttttaattatttaatacaactatatatataaaagacttaaatttaaaattaataattaaattagaataattctgccactaattgatttacatgctagatgtaaatcacttatttttttaaattttttattctaaaagaaactgaccctaaacgctgttgatttgatgtataaacgctcttgattagcacttagctaataatacgtgttttggtgataagcttataacttgatgtaaccgtaaaatgtgagt

SEQ ID NO: 3846 - DNA, 1091 bp, Glycine max
ttgcatgcctgcaggcaactaacctgatcgtctgcaagaattcctcctgagcaatttaaacttgatgtttccttttgaatcatccatgataaagcaattctctgaccaggacaagtacaattagtcaaaatgttggatgtcccaaatatacagataaagcaagttatcagaaaatctcaggaaaaatgggattgaatatacacaggatcaggtcagcagtcagaattagacacatgaaaagtacttaagtacaccaaagttcttgtgtcccatataatccaacaaggcattttttccaaacaatatacaagtatatatgatgattttcttgcctcaacaatcttatccctgagaaaaattgaatttcttttattatcagaagaaataattattgaaacaatctgtcaaggaattgaataaaagtaaatgacagtgaactttaggataatggtgccttgagaatttcacatctttaaagacaaggagagtgtactcaggtgtgagtgtgtgacatagcatgtattgacatgactgattcattcattcattcattcattcaataataaaagttttctatttataaaaaaatggacaagaaaagtaacctgatgtcttaaaagaggaactgccaacaatccttctggtggactaacttcagactttggctgagatagatcctacaatgaaccacataagagttatgtgcagcgggagaagaatattcccatatcttccaacagcaaccaaagataaaaaccataaaataaaagcaccaacctgcaatgcaactcgtaatatatttcgttcatcacatgccttcatccttgtacttccgaccgtacttccaacatatctacaagattgagatatattaagggaattcccaatgcctgcgggtcgactcgtcggagcaggatgactgatgtcttcaataatgcaaacatcagggtcttcctcaacatggaaattctcagttcttccttttaaaagatgagaatcaataaagttatgttgaatccctccttctctcttaacacaaccaaactgcttctcactggtaattagttcttggggatggagccaagaattat

SEQ ID NO: 3847 - DNA, 1156 bp, Glycine max
aaagccaatcagatgctactgagtaaaatcagaaaaaatgtgaactaagagcaatgacaagagtcaagaatgctatacctgctgctcagtcatttgaagaaaagcaatagtatagtacaccaattctctgatattagccacaaccacctatagaaatgcaaaccatagatcaaagtaatgatacaattgaacacaatcagcagaaaaataagatttcaagaatgttctgaaccaaacctttcccagtcttggattacccacaatggtcaacatgagttcaaacagctgtaaataacaacttagataaaaatgataattcaaaaattattacaagaaatgaaggaaacacaaacaaaaaaccatgcaaacctgatttacgcaagttttagacagatctcagccagtttattatttaaaatcctataattataattttttatcatttccatacaataatccagcaaaactatacgacactaataaaaggtatagatcaaacaaagaggttcctttcaatagtaagctgatgaagccatcattgcagtgactacagtatcccctgtgaattccagtttgactaatttgaaatttaggactgtcttccttgccaaataacaagttaaaggatatcattctagcagctgattcagtttgacacttcatagtgacctttctctctctggaatactgacaactatgtacagtttaaattaaacaatcaagttaacagcagttttctttggggcagtatgcagatgatacggtttcctttgggacagcaacattggcaaatgtaagagcaatcaaggtgatgttgaggagctttgagttggtatcgggattaaagataaactttgccaacatctgtttttgggcaattgggatgactgagcaatggatgaacagtgctgtcagataagttgcagaatgatgtcagtactcttttcttatttgggtatctctattggggcaaactcaagacgtagtgagatttgggatctaatagtcaagaaatgtgagagaaaattgtcaaaatgaaaacaaaaatatctttctttcggggaagggtgactttgattaagtcagtcctaaactcgatccctaaaatttttttcttttttcaaggctccaaagaatgtggtggataggtaggtga

SEQ ID NO: 3848 - DNA, 1155 bp, Glycine max
ttcctagtttctttattgtcaacttgtcattcatatttctgctcagttcttcccttcgaaaccacagaaagctgagtgtacattatttccaaactttgtgaaatcaatataggttaaccaaaaagcaagtatacaaaggatgatacaaacaaaattacaacacaccatctaatgggatcagcaaatcaaactttacaaaatctacaatcaaacacctttggccttcactgggtgaagtgagtcacacaccgaatagaactgtcgctttgtctgtttgtcattgtaaacaagcttaattttttttccacattatactatccaatatcaaaatttacttcttgtgacttatttgagtatcctcaatctcactcacattatactatccaatatcaaaatagtcaggtagggtgaaaagaaacattaccaaggtccatgtatatgctttaaagaagtctataactctccattattcttcctgatcaattttcatcacctctctactttccttccacctcacacatgtgaattcctttaacatcttgcatgatcaaaaggcagtgagttgtcttttaagtggaagctgctctcattgttcttcaactcaaattgaagcagagaaacatttactttctggactttcaatcacaaggctcaaaatggtgtcttccatcagttcagcaagaatggcctcacccatctcaaaaccaattgtttccgtgtcaagtccaaggtccatccatgtcccccttcttgccatgtctttcctaacgatttgctctaaagtgcgtggtgggggcaagggaagcatatgccagcacactccttcccagacctttaaagtaacccttttcatacttggagttagccttgtgctaggatttacaaacgaaacccaaggtgaggccccaaagtaatgctgacaaatctccatgagaacttcattgatagagtcaaataggagcttctgattgttgcaaagcaggttcgagaagagctctacctgatcaaacaaggaaggatccagtatcttgtctgaggaaaggcatttcatcaacaactgatctgtagttaagcaagaggcatgcaagacagctttgatgtagtcatatatcaattcactttcttcaaaacaatattttcttctatcaaattgtt

SEQ ID NO: 3849 - DNA, 1133 bp, Glycine max
attcaagatgaagggcgatcaaaagttagatcatcccttacaacgttgactgcacagttggcactaaaaagaatattgccttttccttgcaaaaacaagtatactgttgtgattctaatgcccaaggcttctccttttcaattgctgaaatcagtattccaatctgctcgaactaactatggcagagaagcaaaggtcagttatatacaagcatactgtaggtagaatatgcctagattttttttttgatcggcaaacatataatatatattgataaattgagtaccagaggtactaaagtacagctatataaatgcccttactctggttccaatacagactaaatggagtctggtgaggaaccacagccaggccatactatgatattaaatgctactattaatctatgattatgtcctctactgatacataaacccttgtctaaggttactagaccaccggttaaaatgagttacaaaatccttcttcaaatttctgagccatgtccacatgaggaaagctgcctcatccatcattttgctgttgtcaaaagagtcgttggagaatattatgtcattcctttacttccaaatagtccaggtcacagccagccaccaacatttccaccgattaatccttaatccgtcagccactatcaatccatgttggaggaaatgtagaatatgcctagatgtatgggaaacaaccatattaatagattacagttttttgtgacagattttggcaggagttactggcctggcagttttggcattcagtttgtggagacgtgctcaaaataatagcagacatttgcttagcagaggcgcgaattagaagttttccaacactcatgattctttatttcactgaagacacaaaacgtacataacattgtgagagtaggttttgtaatatattggttagtgatgacttaggaggcaaattaggcttgaaatgaaacatatgtacattgatttgtgctggagagaattgtatcgtgcagcttctcttgcttttttacaaaaggaacgggaaaccggatggtggtgcggcattgcttccataaccctggttatttttctaatctttcagaaagcagtagttctggttgacatagttcctgaacaagt

SEQ ID NO: 3850 - DNA, 1041 bp, Glycine max
atggtccagcagcttcggctttttaggtatgttacatttgattggtcatggtgagacagcctgttttgctgcttgtcttttaaggattaatttcgtaagactacaacaacaacaacaacaacaacgcctaatttcgtaagactgatagcagaatatttattaactaatgttttgctgcttgtcatcatgagacagcctgttatcataaaatctattataaataaaatgttatactttttcaaatacaaatatctaattaatatatagtaaatttaatagcagaatatttattaatttttaatatataataattttaattattttaacaatataatatttattacaaattttaataatattattttataacaaattttaacagaactcatgcatctaatgctcagagctatttttttagttactaatcatgaatatgtgctttaatatctgtttgttagatacgtatgttatgttttattattgatcatgaatcttacaattcacaatttgaataccaattcaactaccatgcactggtcattaattttaaattctgaatgtctgtagggatctaatgaacgaaggcatctttgatgttgtcaccaatgttttgcaaagtcaagacaagaagcttgtgttaactgggtattgcttcctctatgccaatttgatctgtataaaatttcacttgactgttttttattttacttatgattaatttctaatgggaaaccattgtgatggttgcagaacagatatcctcattcttttcttgaatcaagaccctaatcttctgcgatcctattttgttcgacaggaaggatttgctcttcttggacttttggtatgttttgtatgcaactgagttcacataaactttctagatgacattcatatataaagaattagcagatatacataaaataaaaaatttgtaggtgaacctatatataataatgctttgttgctatactgcaattttgaaaccagaagtcagttgtgttatttagtggggtgttttgtttgtttccttgtattagt

SEQ ID NO: 3851 - DNA, 1180 bp, Glycine max
tacattgaaggacaaaacatggagtaagtatctggtccaaggcaaaggaaggacttcacataagaagcctagaatgcctaaggacttttagcattcaaaagtaaaaaaactcgtaaaaagactcaatcaggaattatttttatggttttgttagaaaggatatcttgcccagtcttccttttaattctctattcttcagtcttctaataaaaacaaggaaagaaagagaaagaaaccttgtagcgagcagctggacgtgcaccagatacagtgattggtacccactcatcatatttaagctccttatgccaattgttgacttccatatctgtccagtattcttttagacaaggaaagaactgtttcaaatcaccttttattttaaattgtcacttcaggattaactgtcataaacaggcaatggatctcaaacgacaaattctctagagattagagaacacacataaaatgtccagaggagttaaactaaaagcatagacatgagaatacaataaattttaaaaattataagacatgacataactattatgcaacatataaatttcaaaaattataaaacatgacaaaagtcagaaattataagaactattggaagaaatgatgacaaaaactaaatgccactagataaaccaattactcaagccacacatccaagatacatagtccaattcgaagtattcaatcaaatacaccatgaaattcaggagaatcaatattgaaggctcaaaattaatcacacgacaaacaaattcatgattacaatattagagctcatccaaacttgacattaggtcactcgtagatgtttagtcctacaaacttcatgctccaaatatccaatcctaggtgtgaggggtgtgtataagatgtttcacattgattaggaatttggcccacaccaaagttttccttataatgcttggtttctgtcaggtcatctttgaagtggcctattgctttggcaattggcattccatttcttatctaatgcttctgtttggcatccatgagtctaggtaatggaaatccaattcctacctcataattgacaatacctagaattctagatactacaatgagtatagcaagaagagcatttattgttaatttgttatcaaggcaaagcatgaacactgaaaacagttcacagcccccggat

SEQ ID NO: 3852 - DNA, 1036 bp, Glycine max
tctagagtcgacctgcaggaaaaatactcaggagtatataatgctaacaggttttcccgaaggactcctacaggcacagcttgttagtgtaagtccacactcactgtagacttggctgttctctcccctatctatttattgaaacttaggatgataggatccacttttgctgaaggaaaggtccatgtgtatacttaaagtcacagaatgtcatttggtgtttgaatataaattttcagtgagttcgatggcagctatggaaagtaatcaaaataaccaagtagatgtcaaatgcaagaaatggtagtccaaattacagatttcagcagtttgtaccctaaaacgatagcatctggtatataaccaatcagttaatctgatttactatcataaatgaataaaaaaaataagtaaagaggagtacaacacactttttaaaacatccttttaacatactctctactattaattaaaaataaaatttattagaaattgcaaaatcacgaatgaggctcattatataaggtgagacctgcccaattttgtattttctgataaattccagccaatagagtacttaaaaatgtgcgacaaagagtgtgttgttagcatttctcaataactaaacctgaagacttcaattgcattctgactcatgcttctaataaatgagactaaataatacttccatgtatttttttattccatagatgttattagcataacactcactccattcttgtcttatgaattaggcaaacaatttttgtcatcatcatcatcatcaagaatgagtttaactccattattcttaagagcattcacaacagcccaaaccttggtttggttcttaaatcctttcttcccaacttctttagttatgtttgcatgaatccctcttccttctccttcattaagcccctcaactttcagccgcctggccaatacctctccaacaacagctgctgcttttgcattgcaggatctgccacactcaagtgactctttaatggtgtgttctgcaggtcgactctag

SEQ ID NO: 3853 - DNA, 1202 bp, Glycine max
tacgccaaccttgtttcctgcagctttgtctctgaaatgttcaagtagtttctcaatactcataaccttatgttctgccaagtctctaactcgtacactcacctggaacaacaaaataacatgatcaataatcaaggagcaacagcatacaccctgatgtataatattcttactggtggaaatgaaaaaactaattatttttagcccagaaagcctaggaacacaggcaccataagaaaatagtcctcctatactattgatgtcttcaaacagatcatagaccatagccatctctataagataatgtgggagaaaacctccaaaattattagattatacaaccttaatcagaattattgaaatgtagctcaggcttacattacatctaacttgaaattcctttcaaatttgaggcagttacttgagccaaaatgaggagaaattattaggcggctcaagaggccaaaccatcatggttcccaatccatcaatcttcacaacacataattaagtgttcttaatttttcacacaaactgtaaaacttgaatgcgttatataaatattggtcgggactatgaacacttggtagtcctagacaacttaataatttctctaaaatgagacaaatgctatcatgcttttaattaaaatcaatcaagcaggagcttaaccaaagttttaacttttaaccaagctagaatccttagtccaagcttggccaaggaaagtgtatatcttactttcaatctcaactctattttagtttctgaatttgaatgttttgcacgtcagaaaatgacataagtatatataatattatatgcgattaaatattgtcaaacaagctattcaaaagattcataaactatatgtataactatttgtgcacagctcatctaagcaagattgctttcttctttatacacttctacgtaataccaacttaattatccaagtgtgagatgagaagtccattaaaactgtgcttgacagcagccctaggtcaaacacagatcaaatgcatgaggatatgttacagaaagagaagggcagaggttttttcagaggggaggtagaactgaaatctaattacacaaacaatttatttatgacaagaaaaaaggaagaacctgtcctgaattagcttcctcctctccaacaaccaatatgaagttgtattgtgctaactgtgcttctcgta

SEQ ID NO: 3854 - DNA, 1090 bp, Glycine max
ctctagagtcgacctgcagcttctttttggaattctgcttcttgggaattccaggcaagtattcccaagaaaatggaacacctgagaatctaagaggggatgcaggactaagaagtggatcctcagggaaaaagaatgattcaaaggaggaagaggagggtgaaagtgatgaacaagaggaggaagaggaatgagtcctgcgagatgaagggtaccttcctgcatggaagatgtcatattgttttggaacaaccttggcatgctgacaaacacttgctgatgaagaagaatccattgtgttcctgctgtgtgaggagaaaatatgtcactcaaaacttcctctaggcctcattgcacattttattttataggcacaaagacaaagactacagagtactattttaataagagttttaatttctatgtattttagggtaaaatattttacatgtcagctaatagaaattattatgactttttaggttatttatgttggataacatattttaattaatttataattttttattggttgaaaaacttgtttcataatttgataaataactttttttagtaatttttcgtgttttttgaaatattacttaaaataatatttttaaaaatgttagtttataacttttaattttttatatttttattttcaatatatttattcaattttttaattacttttttaaaaataaatcatgattttattatttttttgtcattttacattttttatatatttcaaccactaattttatcaaatacttaaaatttaataaactaatttttcaactttcatctttaagttatcaggtaactttccaacttttagataattttttaattagttttatcaaacataaatttaatgtaaaagttaataaatttaagaaaaaatacagtaatttgcattatctatataaactgtgaactctactcgaagctaataatttaagaaaaaaattataccgttaattaatacaaaaattatcattagtttgacttttaagttaattattataaaaattgaaaaatttaacatataattatttttattgaatgtttatgtaaaatcacttac

SEQ ID NO: 3855 - DNA, 1109 bp, Glycine max
  misc_feature (527)..(527): n is a, c, g, or t
atgcaccactgaaatttaagcataacgagtaaagaaatcttattgatattaacttcttaaataggcgctactggaatttgatagaaatataaaccattcgtgagcctacaccaaccagctcaagattttgggagagttagcctatgatataatatcaaagctattctaactgcttcagggtttagacagggaaaaggaaaacagaatagcagctaacaatgtattatagtaagaaattgcaatacccaaaccttaatactttcatttatactgataatccggttaagtactagtgttacaaacagaagcccaaccccattaacaataagactaataatttcataaccctaatatcttccaaaaataaccaagtgatcaagagtttggtaattggcacccccattttgaaggattaaattaaatttaagcataacataaaagtaggcctgggtattattcaagcttcaagcctgtagggccctcacatgagtgggggtggggccctcacatgagtgggggtggggtgnggggggtttctagtcctccaccaaacagcttaaaaagcttttggaagtgttgatctttgataataatttttcaataagctaagtcggactgtcaaagatgtctaggcccccatgctattaaatggaataaagttgctatctttgtgaattaaaaagtttatcatcccccctttttattgaagctacttgttgacaactttcccatatatgttgttacccagaaaaataattctatttctttgtttcaaagccctagttggttcctagtttaaatcttcctagcctctccagctggctccaccatcatagtcctgaaactaaaagagcattcaattttagcaagtcatgctgatcttaagataacctcagattcaataaactcattaccactattagtcaaacctaaaactgaattggttgatcggacatcctgattttgcataactttgctagctaggtcatatagtttgagagaattataattgcaccaactttgcaaccaacaaaaatctaaaaacaaaactgcaagtaagccaacctacataacaatgtcactaatcaccatcaatcagcagtatacta

SEQ ID NO: 3856 - DNA, 1005 bp, Glycine max
tctctcaaaactaacacctctaagtgaattaacacttccatttcgaggcgatgaacacacggacccaaccgatgaagctgtgcatatggtttcctccatagttgcccacccgctgcgcctgataagttctagctcctcagccacttcaatcatggtaggcctcatgtcactatgaaaagcaaggcatctaaatgcaagctcagccaccttgtgaatggaatagagcgtccaagcatccctatgtggctcaaggaagggatctatgatgtcatctatgcaacccttcctgatcctatcaacagcaagtgcagccaagttgatttcactctgaggccgtgcaaaatcaaccactttcatggctgttattatctctaccaaaaccactccaaaactgtagacatcacttttatcagaaaggtggaagttctggtggtattgaggatcaacatagcccggggtcccttgtggggcggtcgaaatatgtgatgtttctgacatgccaagcctagaaagcccaaaatctgccacttttgattgaaaattataatccaagagtatattactggattttatgtctctgtgataaattggaggatcatttgcggaatggaggtatgctatagcattagcagtttcagtagcaatggtgagtcttattgtccaaggaagtactccacccctctctctttgcaaatgttgagatagtgttccattaggcatgtactcataaacaagtatctgctctcccccttctatgcagcaacctaagaggcgcaccaaattcgggtgactcaccgaagaaaggagcctgatctcattcatgacttggtcaacactgttggtgtctctatacttaatcttttttatagcaacacactcatcattgtgaaggtgtccagcataaactgtgccaaaagccccagttcccagcctatgtttttcagagaaaaaactggtggctctctctatttctttgtagggatatagagggacagtgaatctcct

SEQ ID NO: 3857 - DNA, 1097 bp, Glycine max
agttgcacaaagattttatgctgttcttgaaattctatacgagctttctttcgttcaccgtgtttcagttatcatgtgtgcccacgaagaagacaagggcaattgtgtctgattttttcatcaatcacgcatgtgcacgtcacatgaccattttgggtttaacggaaataagtatgtaacaaaatggcaacaataatggatgtcattgtaataagtgttaaacacagggagacaactgtaatttggtctattctttttgctgaagaacctggtgtgtttttgttttttgtattgaaactattagacaacttagaggcccaaaattcatgagggttgggctttttgtacgtgggccttactggattcatgatccaaaccagccagatgtaccaaattcaatgttacaaatttctggtcctctattcattttaatgattgatagttacattttcagcaagctacccaaatttgtttgggtgcattttaaaagtcttaaggtcccacgttggcactttgcagagtggaccccaagaaaacatttgtcagaagacattttcagtacaaatggtcatatgattcaacttagttaaaaaaaaaatactattagtataaaaagatattttttttttaattcttcaaaagaaaaattatgaataatctaaagtttaacttaaccatcagtaaagtttgataaagaattattaatataatcaattataattagataatgagttaatttgtttaaacttaattttttaaaatatatatatatatatatttaaaaaaatgttttttaataaatagatatgatttatttcttaaaataattagaaaattatttattttatttaaataagaaattaaataagaaattatttatattttaagtaaaatcaatttaaaaaacatattagaaataataaaattttatttattttatttaaaaaataaatctaaacaaactagtccaatagtttattcacgtgtatgaaattggacgaaagtgtacgttgataattatctttttgggaaacgtagattttagtgatacttttctttttggtcaataacttagattttagttgaaatcagtagat

SEQ ID NO: 3858 - DNA, 990 bp, Glycine max
agcttgccatgcctgcagatgaagaattttatataatttaaaatattaagctacaactacaagagaaataaatgggtagatcaactaagacaaggtgaaaaattctaccatgtgttgtaagcagtaagacatcaatggtagggtctgaattgaaagctttgacaatttcaaaacgctttcctggctcaactgatccatccaaccgcaaatacgtgacactgtaacacaaacgaaaaattcaagatgaaagctcagaataaaaaaataaccattttagagcattgtagttccatgcaaaaacaaacggaaactgctcaataacaagcattttgaaaccaaatcatagttccaaagcctgattcattgctttcaactaagatcattgaatgcaatgaaacaggcattggaacctaaactataaatttattaagtggatgactaggtccaggaactaaccttttcatgtgtgtctgaaacaaatctctttcaattatatccaggaaagcctgcaaataagcaatcattagaagacacatcagtaaagcttttattaatcatcaggggaaaaaaagtagccccaaagaaaaggtaatcatcaccttatgttgagcgaatatcaagaccctatgctgcccaacgttaaccgcaccctcagaacctgaattgtcaactccaattccacattcttcaagaatctcatgaagagcaactaattttggggagtgatagagtttgtgaagttctgaaataacatcagagccagcaggaaacagttctgagaggatagtagaaagtgactccggaatcttctcaccaatgacaagcaatggatgactacagagttttagcaagtattggagtgcctgaaacatggaatggatttcagggtgttaaaaaaaatagaaggaacaacaattaacaagtaattaaagaaatctaattacctggaaaacatgtgaagatgctttagtagaactgctacttccttct

SEQ ID NO: 3859 - DNA, 957 bp, Glycine max
  misc_feature (951)..(951): n is a, c, g, or t
agaaggaagtagcaattctactaaagcatcttcacatgtattccaggtaattagatttctttaattactagttaattattgtttcttctatttatttaacaccctgaaatccattccatgtttcaggcgctccaatacttgctaaaactctgtagtcatccattgcttgtcattggtgagaagattccagattcactttctactatcctctcagaactgtttcctgctggctctgatgttatttcagaacttcacaaactctatcactccccaaaattagttgctcttcatgagattcttgaagaatgtggaattggagttgacaattctggttctgagggtgcggttaacgttgggcagcatagggtcttgatattcgctcaacataaggtgatgattaccttttctttcgggctacttttttcccaccctcaagattaataaaagctttactgatttgtctttaacgattgcttatttgaaggctttcctggatataattgaaagagatttgtttcacacacacatgaaaaggttagttcctggacctagtcatccacttaataaatttatggtttaggttcccatgcctgtttcattgcattcaacaattttagttgaaagctccttttgttattgaacagttgccgtttgtttttgcatggaactatgattctctaaaatggttctttttttattctgtgttttcatcttgaattttacctttgtgctatagtgtcacatatttgcggttggatggatcagttgagccagaaaagcgttttgaaattgtcaaagctttcaattcagaccctaccattgatgtcttgctgcttacaacacatggtagaatttttcaccttgtcttgattgatctacccatttatttctcttgtagttgtagcttaatatttttaaattatataaaattctccatctgcaggtcgactnctagag

SEQ ID NO: 3860 - DNA, 1197 bp, Glycine max
gagtctccttgagaaggataagtatgtgttctagaagcgcagaatgctgaatttattttcttttgattcactgcactagttttttaagactccggaatctctgttgttaatatttctattctagatccattatggctgtttcctcatggaatgacaatggacaaaagcagtttgtacatgatccatgtaagtttatttgtctgtaggtttcatttataacactgtcacatgtttgtctctaattttctatctgttattttctaattcatgtcttgatttgatattgttaacaaatctgttcagaatcacatttgaataaaatttgtattatgattagatcataagtaataacgtgataggctattgattcctgatttttctccatgattgttgccaatttggtttcctctttgtgactaattctgtctataaatcgatggctgtactatttaaaaagatctagaggaataaaatatttccttctctgttctgatatggtatcaaagcttcggctctgaaccttgttatctccaatggtgaaaatggcaatgaccagtgccaattcattctcttcatgcaccaaccgcaagtgaaactgcaacaccacctctagtgaatgatcgtgtggagcctcaaaccagaggttctgccacactgatggagacccagaagaattctaatagagaaagaaatgctttccaaaaatttgtgatggtaatattcactgattatcattgattaggctcagtctatataaaagcatcagtgtttgtagttaaaaaatcagaaaataatattcacttgtctcattttaagtggtacaatagggaaaggaaaatgttttggttactaaaatttttatcttcatttttcataaaaataaagaaggttgaggatggcataaacttttatttgaagggatcatgtttttttctacagcaatggtatttccaggacctccttgttccactggcctttgccttccatggtcataattttttcttttaaattcactcaaacacttaaaaaatacaggatttcaatgcatagtaatgagtttctaaatatgagatcatatacttcctctgttaacttttacaggtatgatgtgtccaaaaataaaatcatgttcttgaaaatatcattttgtcttggaagatcactgctgctattctgatgaattttgtttgatctaat

SEQ ID NO: 3861 - DNA, 1189 bp, Glycine max
tatttcaataatgtttcagaatatctcagaattggacctcctgtgtattttgttgtgaaaaactataactacaggtattttggttctatcatgttatgttcggcatccacctttttgtatagagaattaatatttgctgagttttttaatttgcagggatgcatgggggcgtgtgttagtggtaggaatattaatgtaccttgtagtttagtggcatttcaaattagcatggttattcatatatgtattgcaccaaatcttcttaccaatggataaatatcttaaatcatgatataatatttgttaaacttctgcatttagtcatagtactattttccatcttctaattctataatcgttgaacgccatgtttttgtaattttttctttctttctcataggcatgtacatgaataaaaaaacaaactactgttgacattagtatgaatcgtagtagcttgtgctttactaaatacatcttccttggttacaaggttggattgatcactagttgtttcccccaaccattgttttatgaagttgtgtattcgttacttcatcttcaataaaaatctgctattaatatttcagtaacttaagttgaatatatgcgaatttatcactggatgaggaatgcagatgcttaaccttgtctaagtacttctaagttctaatattaaggatgatttgttctaatattattctcctcacctcagctcagaatcaacgcatacaaatcagctttgctccattagccattgcaattcagactctcttttaaatgaggtataaaccagtagcggttggcttatttgtctctgacacacacacacatatttgtctcttttaaatgaggtataaaccattagcttttggttatttgtggaacatttgaaattacaaatgcatcatttcttaatgagacatcttttttccttttatagttattttgcttgtattaagctggtagtccatgctatccatctacttgtttgcttgtttgctgaagtaattgttgatttttccccctacatgctcgtgattacttggatactcttgtaatgggtgttgtctctttaccttgtagattgctagagcggcccttgtaccagacacaagttatattgccaagccagctgcctcatggcttgatgattttcttgtgtgggtgtctccagaagcatttgggt

SEQ ID NO: 3862 - DNA, 1055 bp, Glycine max
taaaggcggtttgcattaaaatttaatctgtgtcaatatagcagtgcatgttcaaacgtctaactgttctgcatttataatatgccaaccatgcattcatgacctttaagtttatgtaaagaataaggacatgagaattggctaactgctagtgaagaaatgctgaattgaagaaatatattcaacagagtgctttctgtgagcatgttagagtagtttgtttgtatgatacattgcattttatagcttgtgtgacatttattagttttttgtttcaaaatacttccttttggagtctgcaacgttcaaaaattggaaggctgtaaatgttggagcatttagggtgtacttggttgagtaagtggaaagtgggaagccgaaaagtgaacatatatttgaatacaataaaagtctagaatacattgtcattttctttcatttgcattttaatctagaattgaacttctcacactcaaccaagctctctattagcatttgaaaatcaatgccggatttaaactgtatgtatttattttttcattgtatttagtagtcactagccaatgaaagaaatattagcatgatctatgaagtttctcattagtcattcacatagtggttgatgtaatacagctggcgcatgttttgttccacatttgtgccgtatcttgattagctttgttgtagactcatgaagtgaactgaaactcggatcttgatatccaattgatatttgaaaacaccacctgaacaattttcccttcatccatataagcaattttttgttcttacttttcgtgtttatttaaatttatctgagcaggcacttctctcgcactaaccaacttctggagcaaatggggattgatccaatagattggcaactataattattacctatagtttcaagcttcttttttccctttgattaggattatctttgaagcctactgctgtaagtttgcggagcttctgaagtcaatttccttaatgtgtagatgattctgtcgatttcaaatctacctagaaaagatgctttttgtcgatagtttgct

SEQ ID NO: 3863 - DNA, 1155 bp, Glycine max
ctttcagaatatgaacatattgcttgagtgaattcacaatttggaaagttgttgagctatccaaaccagtagatatttcatccatgaatagagctttaactggtccaactagcatctctcctacatttaaatgtttatagctattaaaaaggtgattatatataatcaatttattaaggtgagtaattgagatacaattcaagattgaaatcagttttgttttacctgttgttaggcgtttcttttgtccaccagagattcctcttaacattgcatttcctacaatagtatcagcacagacctccagtcccaaaatctggaaatatatatcaaagaaactagagacttaagaaaaatattataattaattcacgatgatcagaaatgcgttagaaagaatagattatacccttaggacataatctgttatcaaatttgccttctgcactccagttgttacagcctgagagcattatgagttaaaaggacaaccacttaactattagttatttgtatcggtatggaaaagaaatggttcatgcagctataactaactgctgatgtaatggaaattaacggtcactgctttgtttttttacactaatatatcacctattttgtcttcataatttattttgggtgagaaattttctaaccaatagcaaaaagtggaagaaaggaatctccaagattgaacaggtatagtatcacaattgtataggttgtcacatttttctctctttggtttgaaaagctatcagtcattcaacaaataaaaggaaagttaagggatgcaagtcaaatggggaaaacacatcccagacaagcaatggcctctttgttaccttcatgtagatatcaatatctggatcaggcttgatatttgcctctttttctcttcttgacaattctgcaagcaaatctgtagaaggaggaaaatattatacatagtcaaaacttaaatttcatctaaaacgtcagcccaaggtttcaaactttcaatatagaatttagtaatgattcccatgaatatgatacaagctcattcctgtagactaaccataacgagttccaactccttgaactcttgctgagaaggccaaggtttctctggctgtcaattctgcaatgtgaagatcattttgattgacataa

SEQ ID NO: 3864 - DNA, 1239 bp, Glycine max
agcttgcatgcctgcagagtttgtatggtaatcataatataggtgaaggtgagggataaccaccatcctaagctaatctgctctgttgtcttccacttccactatgaagcctcaatcatatatatttttctcctgtcacacaggttacaaccataatgaatcaccagtgccccagcaaaaaacaccaagtgagtcctagatatgatttttcacatttactcagcagctaatagtgtttgttttcacatgttgttgcataactgacattatttctgactttccaaacatgcatatagtaaaataaactagcacaaggtcaaaaaaagagtttagaaaatttgtgctcatgcagcctttgcaccaacatctattggattgacaggtacaaatccagggaaagcaacagtgtccaagacatcatcagaatcagaaggtgatatctaaatctagccatcgttgctttccaaattaattttgcaagcactggctgaagaatggtaaggttgtgttgcaggtgccgcagttgaattccttcactcgataagtagctcatggactgttggaggtgcaacttattaccgtcacagggtgataatcaagaacacttcttcaaagccaatctcagatcttaagttggtgattaaggatctctcagggtctttatggggtctctctccaacagaagaaaaggacacctatgaacttcctcaatggcacaaggtcttgaatcctggctccgaatgtatatttgtatatgttcaaggcggaccccaggctaaagtctcgattaaaagcttacattgatcatttgtagtggccacattcactttttcaactcgtacgtctaatttgtttgacagctaaacttctgtcactccatgattgtaattttgtaatatcaatttgtcaacccactccatccatacctttcttgtccacacttaagttgtaatatcgatttctcaaagttccctatttatttgatcctacaaacaatctaacatatgaaaatgccatttgtgaaattaaatgaaaaggtcgtataacttgattgccagggaaaaggtttccaacgaggaaccccgaaaatgtagttttcattacgaaacgagagaatctgggaaagaaatacacgagttgaaagttatttaagagcttgttcgatggtatttgtgttctgggaggcattgttacggtacaatgattttttccagcagacgatgacacttacaaccacaa

SEQ ID NO: 3865 - DNA, 1031 bp, Glycine max
tcagctccaaattccagtgcagaaattccttcttctgcacctgcttctgtcagctctaatccagtgcagtctcacatggaacaaaatttaaataatcaccctatgctcactagatccaaaatagatcattcgaagcccaaaacctttctggttactgcaaaacaaaagactgtgaagcatgctttatctgacactaattggaggtcatctatgcaagctgaatatgaagcacttgtgaagaataatacttggtctcttgctaaattgccatctcacagaaaagccattggtcataagtgggtttttcgaattaaagagaacctgaatggaactataaagcgaggcttgtagctaaaggttttcaccaacaaccaggacattatttcactggagacttctctcctgttgtcaagcctatcagtattcggatttttctgactttagcactaactaacaagtggaatattccacaaattgacacaaacaatgccttcattaatggtttcttgcaagagggaatttatatgcaagaacctcagggtttgaagcaagtgacaagaccttggtgcatcggctaaacaaatcactttatggcctgaaataggcacctagggtctggtatgaaaggttgtccaaagctctcttgtagtttggttttaaaaccaataattgtgatccttcattgttcatatataattccaaaggattcacactttatgcctttatgtcgatgacatcctgttgacaggctcctcatcctcaatgatttcagatttaattggcaagctgcattttgtttttgctcttaaaaatcttgggaagcctgattattttcttggcattgaagtcaagtatcaatcgaatggttctattgttctcacccaaaccaagtatattagagacttattgcaaatagataacatgcttgattgtaatggcatctctactcctatggtttcaagctacaaactcagtaaatttgggtcagaattactgcctaatgctcatcaatatcgcgatattgttggtgc

SEQ ID NO: 3866 - DNA, 1126 bp, Glycine max
ggcaattgcatgggcaacatgggatcttatagctatggttgaaaatggcagacacgatggacctcccacacatgctgtcacgtttgtgtggaatggtcatgaggtaagaaaccagtcatatttcttatgttttatattctcatttgtgtggaatggtcatgtcatgtgggcacaaacttgtcatatgtagctttcaatgtgacttctgtgtattttatctcttgattgttaaagaggatcaagagattaaacttgccttttattattcagattgatcatagtttcaagttttttatgcttattcgtgcttatttatttgtggttgactgttaaacagtgggaaaacttccttaaaagagattttagtaaaaaattcagaactaggtgaagcccataaatatgggtttggatgggctggtgaatatcactccttttggtttttttgtttcagggagaggatgtaactttggtaggagactttactggaaattggaaagagccgctgaaggcaaagcaccaaggtggatcaagacatgaagtagaagttaaacttccacaaggaaagtatgtgtgctacttttaccgtaattttttctggggatttagtatatatgccttttcttttctcaacttgatgacctaattggctaaaagttgttacaagatattttctaatattctaaccagtgccatttattttataattttttttgtcatttgatttttgtttcagaagcataaaactgattccaccatcaccccccttcacctccctcccaaaacaataccagatgacctaacatggtttcctacatttcgcatgattaatgattttgttgcacatatcattctttgccatcaggtattactacaagttcattgttaatggacaatggaagcattcaactgcttcaccagcagaaagggatgacaagggaaatgttaacaacataattgtgatcggtgaaactgccagcgttcggccttctgttcagcaccagcagaaagtacgtttcaaatcaatatttgttttttttttcttcatttaatttatctacttatagtctcatatgatttgttttcctgtaaagctattattttcttttaattgtgcaattatttaagc

SEQ ID NO: 3867 - DNA, 1246 bp, Glycine max
cagcttgcatgcctgcagcctgagaatatccatttcaacgtgttaggaaagataatacttaccattgatagttccatgttgagatttcagaagttagaaaaagtttgtagcagatatggtgccaaaagattgtttatctactatcagcagcctttaacttaaataactactcttgcatgattttaaaaatgcccacatcaacgtgtcagcctaccatcatatcgggaagtggcatcttaaccttggtgagcataatttcagtattattagccctccttagatcaacctacaattaataatacaaacacccgagttattgatcagttattaacaaggtatcaaataagcatcaagtagatgagtttctaataaatattggctttatgcactaacataaaaaaaaaactgcaccaatatcacctataattcattcatttacagtatcagaattttaatttagggaacatgaagagacagtgaacagaaaggacaataacagaacaatatttattattgatgtaattagcacagtcaacgatacttaatgctttatgaatcaactatcaaggtgtgctggatatttttattgacataataaaattaaagaaaaatacatttgtttcctccacaagttaacaagaagtatctgatctggcaagttaagtaaaaaagaagaagactttgtttgatgaacaaataatgaagtttcaaatcaatggcattaaattccaatttaaatataaatgcagtgatgatatttaacagcctttgtgaagcaaaactacaaatcatggtgatggaatgactaaatgagaaccatcaaatcatttctcacataaggcttatatcaaaaatcaaattttaaaaatattcatatacaataataccaaggtgattttatcagttttagctccaacagacttgcgccgccctccagatttgccagaatcagtaggttttggaacatttgcagagaaaagcttctctagctctgaaacatcaaactctggtgcactaagagagaacataaaaccagtcattacaaaatgtaaccatatagataagatggagaacatacaattatacataattgaaatgattaagtgcaacagtagacaagacaaattacatttgcggttctccatgtctttgtaattcttcccataaacttccttgtagtgcccttgtaaccttgctccaatgcaaaggctttaaggaggaccgtttgggtgccattgcaccagct

SEQ ID NO: 3868 - DNA, 997 bp, Glycine max
atgcagagcagtgcatccttgagcatctctaaagcccaaaacgccagaaccgttccccacaagccgtttcagcgtctcccagttccctcctctggcagcagcatgaactgccctattcatcatgtccctctcgtaaacatcctccatttgcggcggcgagagagcagaacgaagcagaagctcaaacacctcacaactattgctcctcgccgcagcatacagtatatcagtgactccatactctccttcaccaaacacgagcgcagggtacttccccaacaattcacgaacaaaatccaggtcaccagctgaggcagcagtgtagagaagccacccgccgtagccggcgcgaatgagagaattgtgtcctcttcctgtctcgcattgcagcatgagattcctggcaacctgcgagcgacatttcgcgacgttctccaagtgtttctcgtcgtcccacacggtttcgaggcggcggattctgcggagggaagtgagcttgatgaggaggttggtatccaggtggagaagctccaccaccagatcatagtggccgttggcagcggcgcaatcgatgggagatgcataccaccattgttctcccgtactctcccagcgaagaggcaagtatggaggcattgcactggcgctctaaaacgcacacaagtatacttccaatgtagtaagtttaccactgcaacaaacttcaagtctgcaactggtagttgttgtttagatgctgactcaaagtttttccttatttcagtttctaaatgtagctaataatagtgtgattgtgtgaaaattgttggtgtgagatttgatagagtgaagtgtggggatggcataattaatggcgaacatgaacctaactagcgttctctgcggaatttgatggcaaaatgttaaaagaaaacagagtgtgaaaacacgtcacacacaggtgtatgatgttacatgaccagggctttgtctctgagtgagagagacttgtgtcaat

SEQ ID NO: 3869 - DNA, 934 bp, Glycine max
aaagctgttcaatatcattaaaagtggttgctactacctttgatctgatgaacataatcttcggcattaacaaagtatttcataccataaagtcaaatggcttctcacgtaattcattatagctttatgcaaattattttgaataagacagggtgcaaaaactaggactgggcagagatatgaaatattctcatgcactaaaccaaattgtaacaataatcaaaagtttgaaaggggcaatggtaaagattacctgcaatagcaaatcaacaacgggaacctgcctatgaattacagcagcaacaagtgcagtacaatccacatttatgtggagagaaggcttaagtgactgtaaaagcacccggtctgttgcacttgaatccacaccacactgccattggataaaataaaccccaagtttagcatattcaatcaagtattaaccataactaaaaagtacagtaaaaaattgagtacaagcataggttttagagactggcagttaaatactaagtttgcactccacttagaaattaggtatgaatctgtcagttgaactcagggaataggtaattttatcgtagaagtttactcttgcaaaaggacagacaggagaaatcattgaggaagtttcatgaaaaactaacaagcatggaaaatacatgaaagttttctgaatgtagagagagcaggagggagaacattatcagattgtggcaaatagaatccaaactaggtatcagcgcagcaatcatgcataacaaaagatgtccatgataaagtcaaggacctttgggtttaaaagaacctcattgtaggggctagagatgtcctatcttcttaatgcttagtatagaactgatcaaacaattgcaaatgctgctatagtactaatctatgttctggggtcaaattatggaatctctagaactat

SEQ ID NO: 3870 - DNA, 1175 bp, Glycine max
atataggagcaggaagtggtctctgagtggatgcagatgggataactggaggtgctgaagaagaaggagttgttgtctctggtggtgctgaagttgtggggacctctgatctcttacccctagccttccttggccctctaaatgtcactgttggatcatcaagattccaacagttcttcttaatataagccaagttaatggtagggctcaagttctccaaggatcttgaatctgattggactcctctgtccttgcatagagctgtgatcaaggcagggaatccaagtctggatgtgtcatgttgtgcagtaagagagatctggtgggagatgaggtaccccacattcatattcatcttcatcatgatgccataaatcaatttggctctatctaaggtgacatcagatgtgtgggaggtagaaatcaggttagaaaaggaaagaacactccatgcctgagctagagtggtcatgttcttcctcagaatcttcaaaggcagcccatcagcattaagctcgaatcccctccctgagatacagagcttagcagccaacttcttaaggatcaggcctcaggagtgcaaacctggaataagtgcacaaattctcctcctcttccagcactatcggggtcttcagaaatgtgttcaagagtatcttcatcaaatttcactaagtgacctctcaccctcacctacttaggtgatttatcctcggggtcatagaggttggcataaaattccttcacaatagcaatgtctatgctgctgtcatcaaaattagtcagcttctcatcccaatgtcttctttcgagttcctccttgaactcgtcaaactcaatgttataaactatcacattcctctcttgtaatagttttctaggcaccagaatgtctatatatctctcccaggcttcttgagatgtgaacctggatctgtcatatctggcctgggtaggtgtagaaggagctttccttttcttagatgccatctgtaaaatataagacaaaacacaagagattagcacaggttattttcacaaaaacagaaaaataaaactaaaattttgactaggcacttagcgcagcaggctgaacttagcgcgccttataaattttactcaagcgctaagcacagcaagctggcgcttaactcgaagacacaaaaaccattttt

SEQ ID NO: 3871 - DNA, 1269 bp, Glycine max
aaaatttttggagaatatacagagagtacagcatttgaaagaccacttactagtggtgttgcttatgctttgaaagttctccactctgataggatgcattttgagaagcagcatgggtggacaattaagaaaatggaaactgagaatgaggcattagtccaagattgtattcctgaaaaattggatccagcacccattcaagatgaatatgcaccagtgatatttgctcaagaaacagtttcccatattgtatctattgacatgatgtcagggaaggtgtgtcttgcttagcttgctgtcaccctagcatgatttactttttctaagcaaattgtggggcaatggcttaaactgaaaattttacattcctgtcaatgttcttaccatatttgttctgcacaagtatgtataagaaaactagtgtgaagtcatcagttagaaagacttttttttctttgtattttctttatgcaaggtttaggtcatagcattagatgcttggagcttttgtatacatggagtggaatattagaactggagatcactaaacagtatataatttactttgaacagtgaaaatgtgaaagttaaatgtggggtaaacagaatcaactacatacaagagttttactcatgaacatcaataaaatgactctgagcactggttaaaagaaataagactaggagttactattatctattgaattatttgttaaatttctcattatctgtctggttaaaagaaaatattttgttgcattgttgcacaggaggaccatgagaatattttgagagcaagggcatctggaaagggggttctgacatccccttttaaactactaaagtccaatcacctgggtgttgtacttacatttgctgtctataacactaatcttcctttagatgctacaccggagcagcgtaccgaagctactgtggggtaatcctacatttaactatctactggttaaaatatgcatttcatttgtgctctgatccacctcccctaagaagaaaacaattacaaagtgtaatgtgagtgttgttacctatttattggcaggtatctgggtgcatcttatgatgttccatcactggtggacaagcttctgcaccaacttgccagtaaacaaaccattgttgtaaatgtttatgacacaactaatgcatctgcaccaatcacaatgtatggtacagatgttgctgacactggcctactacacataagcagcctagattttggggatccgctacgaaaacatagatgca

SEQ ID NO: 3872 - DNA, 1256 bp, Glycine max
aacactgccaatcttgcatgcctgcagctaagtctttcaacaaacaactgaagaggaagtccacaattagacacgatcaaagccctggtagaaactattacttcatgtgtaatgatattgctacatgttggatttgtttgctgacaaaaatgattgttgcctcattgatgtaggagggacttttgaggaaagccctgctcaagctgaagctcaagctcgtgctgatatgaagataaagatggagggtttcttgaaaatttggaactgggtgaaagaaaccttgggcatgaatattaacaagtaaaatatgtagagaaatagagaaaattgaaaagtagtgatgataaattagagttatgcagttaaagcagaaaatttaatagaaattctgaaattccaatatagaatgatgtgtcttcttgagataaggacatgtgtcttcttgagataaggacatcgccacatcgggtgtggaactactttggagatatagctcttacaattacaagttacatgttaagtttcaaatctagattaatgaattataggtgattgattagtacaatttagttccacaagacacatcattctactttggattgtatgtatactttttacatatctccctaatagaatgtaatcttttgcctaaagcttcttttgttgcctcactatctcctgctgattcaatatccctttggggtagaaaagaaatccaaccattgtcaaattagtatatctcttcattttagtcctttggtgcgtaagtcagaaataagagatctgaaatgagatcaatctttgccattcatgcatgtgagtccggtagttcctgtgcaactcccacaagtaaggatgatacttcctacatgcctccttatggaattccttctaggactctgttttctttttcttcatcggtgtattctaagggtattcccaaattaacaactgattagtctatttcaggtatagagattaccaatgtgggctttgtctcttctaacaaagttttttgctacttaagaaatgaaatgttgcttcaaaaaaacatttctattttaatttattctgtatgttgttactccaagaaccttgattctgcaaatagaaagtaattttgagatctgtgttgattgatcctagagtgtaatttagtcaacacaaatttctcttcattgcattgagccataaccaagatgaatgttaatactgcttgcagaaatctgcaggtcgactctagagaagggaccggg

SEQ ID NO: 3873 - DNA, 1252 bp, Glycine max
tttccacatctatttttttttcattgagatgataagctatcagcaatagaattgcttttcttctcatcttaacaaatataattgtagatttaaataagaattgtatcctaacctttgtaagtaactctatttatccttcttccacattaatattaatgacaaaagtggggcactgagatgacatgtttcctaaaaaatagtagaaattaacaactgatgacaccatattggtgcaaatttctttgcttttcttctaagttcattatttcttccttccgactaggcttatggttattaaaacagcaggttactgcttttttcttaataaggttatgctgatgacagaaaatcggatatttgatttttatgtttatttatttgcttcaaagtatttgctagtttggaaatgtctgccatgatgacttcagattggcagatccttcattattttcaatttttatctaattgatatgatcttgaaccagcttactggagatttggacaagatggttgcattgcagagattgttagaaccatatggcatttgtgaggtatgttttataagttttctttcacttaccatagtagatattttgctgagacagttgacttgtttaaattccttattccataaatctccggaaccgaatttggtgcatttgcttcctcaaatgtatctcctgattctgtccaagattgtttactcaattgctattattttgttctgaggttttcctttgtttcacgggtcagaatattcataccagaggaaagaagtcagttttgatggtcttggctagatggccttgttttcttttgatgctctgtagaggatgagccccctacacacgcagttagcatgtcattcttacacgttgatgttcattttttatcatctataaagcacaccagtagtagcctgatgttcattttttatcatctacaaagcacaccagtagccattattttaaaaaccaaattagggagcataacagtcaaaggagagggttaagaattgcatttcaaccagaatttggagtatatgtattttattaaaatataaaaataacaaaatacatcagaaaaaaggaaaaatatagcatgcacggtggccagtatagcatgtgatatactcctattgttcatcgtctggtggactaaagaaaagactgttaaacactgtcatttaccaagcctgtgctggatcaacagtttagtgctgatccggccagttatcaccagttcaaggctt

SEQ ID NO: 3874 - DNA, 992 bp, Glycine max
aaatgctacaagaccaaattaaaaaagaatcaaagctagttgacaaaataatgcatcaagattcaaaacaatgcagacagaaacttagcaaagaaaagacaaggcaaaactagtcgagacttggattaaacaaggaatgaagaaaagaaaatcaaagacaaataaatgcagtggagtggtgcaacagtgtatcattaaataatcattaacaacgtaattgctattgctgtgaaaccaaaccagacttatggagtagaacatgttgatgtcccttcttttaacttagtcattgaacactaacaataccgagaaccaaaagcatttttatcaatctctacatatatgtattttggtctgaactatgagaccgtagagagctaaaatcacaccaagaggtaaaagtaatgaatagaacacgagagccaaagaaacagagatccactcatcataaatccctcataaacatatgcatattattgaaccggtaaataaacttcaactcagacatacagagaacatatacacaatcaatcaaaggacagtgttgaagacctgaggtttagccaaatcaactagtctagatatttatcaaacaagtaactggcaataaccgaataaatcgcaatagtagcaaacaacaaacaaaccaaaactaataacaactcaaaagcaataaaaaaaaaaaaaaagggaggatgattcagggaaaatcagaagaatcaaccacatggaacatattcctcacatagagattgcacaatgagaacttacacttacacagataattaagatcagtgttgcctactattaatagctcagtgccaaaatacacctaaattcttcaagccctgaaaattacaacaagtttttctccttgcaattcccttttctccctttacagaagtaaaaattctcaccccctttctctcttgcggtggcttccatttattgttggtgtcttgctctcctccttgagccaagcgtgatagttg

SEQ ID NO: 3875 - DNA, 1036 bp, Glycine max
aagttttgttagtagtgatggaatctgattcatatgagcaattgggcaaagtaatgcagtcgatctcaacatgttcaccacttgcccttgagataaagcagctaaagccattaaagttccctgaaatttcagcttattgttaaatatacacacaaactagaaatgcaaaaggtttaaccacatttttagtcgctatagtttttcccaattttggttttaatcctcattataggagtttaactttgagtccgtataatttcaaaatccctaggatttagtcttagccatctcatgtatattttggtcttggtccctataccaagaaccaattcctagtagctttgaaactataggtactaaaccagacttttaaagtgtaggaactaaaactaaaattagaaaaaaaaacattatggaaactaaaaatatatttaatatgacaaaggagaatctaaaaacacaaacataatgaaattaagaactcaccaaggaatgacctgcatagtgtattctctgaccagtatagttgtacacatattgggcaaaagcaggaagatcataactagccaattcatcccatgaccaatcccaataggcctacacataatgaataaaatgattatatatccattagaggagagctctatatcaactggtttactcaaagtctgaaaactgaaatgcatgtgtctcataaggaaaagaaccgtgtcattaggaataagtgatgtgtgcccgctgctgtattgtgtcccacgaacattggcgagccacacatcatacccattgtctgctaagataaatcccaatgattcatctggagaatttaccagccatgttgaagcatcctgaaacaactcaacacaagttaattgtctaagttcaataatcacactctacattttttaaatcttagcagacaaacgagtttgcttttcttatgtatttgtctttgcatcaacacaacttacactaaagataccatgttgtaatagcaccggcggcttgtcagctttctcaccggaccgtccttctg

SEQ ID NO: 3876 - DNA, 1262 bp, Glycine max
agcttgccatgcctgcaggagtctcttttctgagcataacctaagagtttgcctcaaacagagcatccttgcggacacaccattggagctcgattttgtttacccttttttaagtactgtttggtttgtgattttgggcactgtgcagtccattttttatgtgttttgcattgttgcgaagaagtttccagtcgcctatcctaccgttgtctcttattagcgtgttttttggccaccgcctttatcttgccactcattttccggcgaagaactgtctagtcgcctattctgttgctgtccttttctggcgtgtttcttagtgacttatttgtcactttatgacgatttcgtctcttcagtttgaataattgggtctcaacacttcgtttgaagcttccaaatgttggttttaagaagatcaaaacttgctttggattcacttaagctgatgggtgttccagctctctcttcctagcaatattccctgatttcaccaagatccctaagttgtcttcaaaatattggtttagagctttagaatgtggttcttaagaaggtcagaacttgcttgctttgcttgccataaatttcttagctgatggttattccagctctttggcaatgttatctttctagcaatattccctgactttgccaacatcctcgagttgtctttcaaacattttttttggtggaagtcaattttatgtttttatttattggttgggaataaattttcttgtaacaagttgattgcttagtaaactttagcttgagggggagtgttgaaaattagaatgaatattcggattcttgtaatttatagggacattatctttgatttagagaatgaatattctctatgtatgtaccattaatgtaattatcctatgtaaacatgcatccgctgtgtactcttacacatggtttcagtctattatccctctatattttctcctattttacatattccatgctttttgttgaatttcttatggactagagatccactgataattgttgtttatttttgtttttcgaattattaattttttacttctgtctattcttttgtgggatatacagaaaatagatgagaaaacaatcaatgaagtgttcttgaaggtgctagataactatatcaggtggtgcagatacttacgaattcgtcttgcatggaataggttattacttcaacctactcatgctttgaatatcttatctctttaatattttacttgatcgtatttcatttcatgttt

SEQ ID NO: 3877 - DNA, 1035 bp, Glycine max
acctgttggtctccttggattgcttctgttgtttcaggtgattattagtagcatacagtgtaattaagaaaggtgcaaagtagcatgatgatctggtattgtttttttaaaagaggctattagtaagattattttgtccggtgacttttcactgtgtttgctacaagttgcataatatgttccattccacttttcagaagctgattttttctcttattatttgtctcttatttcctcagaccactagagtgagatttgtctttgatgatgaggctctggtttgttctcttcttacttctccaagaactttgtgctttatgtattgcattatttactttcttagcacttacgcttcaagtcttcattatttactttcctaaaaacctcagtagtttgtcttattacagctgaaaaatgagctgaatttgttaattcaaattaatctgaaaggcccacaacttatacacattcttaaagcacaaaatgtcatgccattatgtaaatgaatgtcagataatttatttttctttatactgcaaagcaagtggcccttctaatcataataaccacaaacagagaattcgccccattgatttctgataacaattatattttcaaacattatgctttgtagcaaatctctacctcttttgtttgatgcaaaaggactaaattgcatgaagaaacacactatgttctagagttttgcagcttgaccgagtgttactttatatatggtttatatttatatgaaattatcatccagttctggctaccatcctagtatatgtaacttcagcagcatattgtgtgcatgacttcatgacttcatgtatatttattcttctctccttttagttattcacattagttttatacaaaatttatggtttaggaggtaaagataggtgaacagctccaggaatcaggtgagaatgttttcgtgggaggaaaaaaccgctggaagtaagtacccgatttcatgtttacgcttactagaatttcacaacagtaggacaaaaactagtttgatat

SEQ ID NO: 3878 - DNA, 993 bp, Glycine max
agtatgttcttccctttgcatcctttctaactgtatttcactcactcaaatgataaacttctaactcaatgtcctaatttcacagaaatcagtagaggctaacaaaccttcaggtgctaaaggtgtgtactggaaaagtgctcacatatgctcggccatgggaccttcaatcaggttaaatatcagggagatgcttgattacagacctccatcagaatagaaccttcacatgtaaatgttcgtttggcctctgtcagctatcccgggtgccattgtgagatcttgccaaatatttagtcaaagatgttaccaaagttacatacacaggggataggatctctctgttccaaatgtttgcacactgctacattacataatctttgaccccggctgaggattttccttgtattacttcgtaactaacaccagagatctaattatattttcttttcgtgggaataaattttcatttttacgttttgatcattggtattaggtatttcactcttcaaccgcctgtgttcattgtactcaatacaattgctatggccgagtaaaccatttacaagatcagcttcatgttttctagaagctatattctgagttctaattgacacctgctgttaaaaaaaatcacacctcacttaatagctgtaattgtaacaaaacttatttataatgttgtactatttaattttcttttaaaacaaaaaaaggataagagttttaaattaacttaaatttaaaattgtttgaaaatgtttttatctataaaataaaaaacatctcaaaatttatataaacattatttttgttattttacatcgattagttgttttaatagttaatttattaaatacttatattttaattagatggtaatttttaaccacttaacttttaggtattacaaaataaatattcttaaaaaatacagcttttttgggtgaaatacttgcaaaatacagctaatactgaaaattagtaactcta

SEQ ID NO: 3879 - DNA, 1207 bp, Glycine max
acttaatttctttaccttcttctcttctctccccttaccttatttcctctcttccttttcattgagaataaaaaggtttgattttcggctcagatccacgccaacactcattttcattgcctatttacttgtcaccaaaacccagaagccaaatttttccacttttccactttttctttttcccacttttggataactattccgaaggaagatatatagatatggttccacagaagtattaaccgaaagcctgctgtttcaaaatcctgtcgggaaccatggctgcgccactaggcactagccttcaaagcatgttgcaggctgcggtgcaatctgttcagtggacttatagtctcttctggcaactttgtccacaacaagggtgcgtactagctagttattaattaattcaactttatccacacaagttgcctcatatgataatgattaatcaattactcttcaaattaatgtttcttaattaattagtctctgtaacggacacatgtatgtactgtatgatgtatgtttgggtatgagtatatatgagtgtgacccttaacaagttaattttaaggtcatgttatatattattttatgttaatttaggattctggtttggggtgatggttactacaatggagcaattaaaacacggaagacggtgcaaccaatggaggtgagtgctgaagaggcttctctccaaagaagccagcaacttagagaactctatgaatcactgtccgccggagagacaaacccgccttgtcgccggccttgtgccgccttgtcgcctgaggacttaacagaatccgaatggttctatttgatgtgtgtctcattctcctttccacctggtgttgggtaagtcagttacattatttctcataaagttctctttaattgttatgtctttacttattttatctacctttaactttatcggttctttaaaacttcttttaaatattgaactatatatattcgatgttatgattttttctatctgattggccatttttctagatatgtatagtttcagtccatatataattcaagtttccttttgaaggtaagtggaacggtagctttagcaaagtgtgaatagaaatattatagtgaaagagaaagggagaggctagctaatgtgacttgtgaatttaaatgcaacaatatatagcagctgcaggcatgcaagctggcgata

SEQ ID NO: 3880 - DNA, 1176 bp, Glycine max
ctctgagtcgacctgcaggactaagaatacatttgcttttggcgtactcatgtccggcacactcatgtccggtggagggttatacctatatgatggaccaaatttaacctcccctgttttcagataatactgatattctggttggttagacctttctggaaatgcctgctccttctgactactgcttggaggaccaactggggaaccagaaggtggataaggtccaggataggcagctgctggtgaaggtagctgggttatcccataaagctgtgctgaaccaacattagatggagtaccagaaggaagaacagcacctgatgcagaagcctgcaccaagagctcaatagttaatggcttcaatgaatgcatgtataatttgactgaacaatcaaaaagaaatgcttgacctacttgataaggaccccagccagaaataggtaccatggcaggggacagtaccacaggtccataggggctctggactaatgagccaggcagcataggaggcctcgcaaccagcacaccaatttgctgggacgaaggaccaggtgggggctgcatggttgaatataacggcgaaggtactggtacaggcaaaggtgaaactggggcaaatggcgatggtggaatttggatgccagcaggaactggatgatggaatttacaagttgcaccaaacttgcattgtcctgttttcacataataggaacactccttctcaccctgttatcatatttataaacattcaaactcggatcaaaatatttccatgatcagaaaacaaaacagaacattcaaaagcatgcctagccttatgtagtaaatacaaaaagtgatacagacctgtcgcaatggatatccataataatttagtgacacaggggtagcagcagcgccccctgctcctgcctgcctggggtggtggtacttgcaagatgaaccaaatttgcatgtccttgtcctcatgaaatactgcattttaaccatcagcagatacagtcacaagccttaaaaacaaccgaaaacaaaaataacataaccacactccatccatccttgacaacattatttcacaaaaaacaagaaattgcagtgtgagccatcaaactgaatcattcagcagaaccataaacagcacctggcacacaggctggcctactcgttccggatgct

SEQ ID NO: 3881 - DNA, 1178 bp, Glycine max
ttctaatgatatttcactaaatggaatgattcttccagctgctttgtatttttggcaaataccacattttatggccctagcctatttgtgtcgtgatgactatgctgctggagggtatgctctcataactttgtttgtactttatagtgagaattttgtttcatacaactcttttggtgctctgtaatacaatatttgttttaagtgatagatattcatattgtttgtctagtcaatatctgcctaaagtccttgttcatataaacaatgatgccatatctgattcaggatagcaatataacatttttttgaaattatggggacccaattataaggacctagaaagttttcaaaatgtagagacctacaggtggatttgtccaaatttatataagcatacgaattgtactcattaaacatggattttgttacttattgacacgtgtgcttctgttgcaaatttaggtttaagatgtactctcttgctgatgcatctgggcatagaacagcattggtggctttaaggaactctatatatctaatccctttggggttcttggcttatgattgtgagtagatgtttccttttttcttgagatttttttatcttaattatctggtgctagtattgattgcatgctttgataggattcgatagaaatttcatttgaagtaaaagcctgatcaagaaatctttcttaaataagattctggcctgtgccgttttgtggagttgtatgaattttgaatattttataattaataaaataaaaaattataactttagtcaagtaaaaaatatagccttttagcatgtggcaatggggttggacagagacaaagctgacaagaaattcagtatttggttctgttaataacatttgttgcccgtgccactgtattgtccaaatagttgaagaccttgttcgtatgttttgtgctgaaaggcattagtgtagaagcttgcatacagaaccttaaacttgtatataagaatttgttcacaaatgaggggatttgagttaaactgacgattgaaatggtagaaagttttcatttaatatgactttttttacctcaaggaaaatcctgatactcatgtttctgcactgtcaacagggggtttgacttctggatggttttgtcttgagtccgctgcacttacacttgcaataagc

SEQ ID NO: 3882 - DNA, 1235 bp, Glycine max
ttcgctgcctgcagcgccaattttataagaaaaaaagaaaagtttgtgaaaagagaaagttcagaacggttactgtctttcatatcaagatatatagttctagactctagtataatattaatgacagaatattatcatgagtttgaaatagatagatcatacataaaaaaaaaagcttccatttttttattttttgtattacgactgccagacaatattataaggaaatgataacaagtgcccttaaagcactagtttaggaaataaaaaaaaaacaatagaaaaagtattaccaacacatcccattatgatttttattgcaattttaccagtatttctgataaaaaaatttccatttatttgtttcttaatccatgcccttatgacacttgttaggaatatcccttattataaaagaaaaaataataattttattgtgtttagtttcacttttctactatttttaaatatccactcatgattagttagttggttattaatcatttccaaaataaaccttagtattgctgtttgatcttacattgcacgttcaagttttaagattagcatatattgtttgctgatttattttatcaaattgatgttagcaccactcccttgcctaccccaagtttagtcactatgcgggtcaccagacaagggagccaatacacaaagcaattaagtaaatgacatctcttttcaacccttccattcaccagaaaacgttacagggatgcatacttaacatttatggatatggattggatcctgagacaatcaagacaaaaaaaaaaatgatcatcatgaaaagtaaaaaattaaaagtaagagaaaaaaataaattggtaaaaagttaggaaagattgggacattttgttcatatagaatgatcactcaaaagcaagggcaggtcttgcttgtcatgtgtatgtacaaattggactagagcatcaggtcattagtggctttgacaggactaaggttctgctgagaatgtactaacaattcattaaggatgacaggttttttaagtactgcatttacactagagtgcatctcgtgtgaagtaaatccatcatccttcatgtaaaacaggtgcaacacttttatcattttccaaaacaaatccttgcactctctgggaactacacttcctttttcctgcaaaattaatctcaggagttctcttctcttttcttcagcaatacccttcatttcttcggtggcatctt

SEQ ID NO: 3883 - DNA, 1189 bp, Glycine max
ttgcatgcctgcagaaatattagtttaagtgtatgccaaaaagatgcaggcaacaaaataaattatcactaacctgcaaagttctgcaaatagctcaaaaagcctatgaggcctgcgcagttcaaatgcgatttggattgctttagtatagtcagcatctgagacagcattctctagctcttgacctttcacaactccctcttcctgtatcaacattagacattacaacatttttaacacaaagggcacttgtgatttggaagataagagtatataagaaaatcctaaaattacacatatggaacaggtaatgcttttgcttgaaatactccatgtcactaagataaaggtaaatgttataaaaaaattcctgaatgaattgtccattatgcgtttggtttggcttattttgaagaaacaattgtttttttccagctttttgagagcttttgaaaaaaaaaagtcccaaaaaataactattataccaaacatacacttaatgccaagattatatcacttgtgaaactatataatagactctgtaaaacaacctaactcagcaagagactattgtgaaaattaataaccactaacttaacaccactatattaagaaaaggcaaacccatagtagaaaacgtgtcattaaatgattggaaagactagggagatttatgacccaacccctacaccaccctttaccactgtgctacaagagtaaactatgatttcaatcttgcgcaacataaatgtacaaagtacaaaccaccctgataatctaatttaagatatcattaaggtattgctgatttacaatttaaaaaatcctaaactcttaatgttatgtttttcaagacggttggcattagcaaaaatgagcaagatggacaaatccctgacaattaaacaacgattgtaatgatctttagtgatagatgtttcattcagatgacttccaagattgtgactgatcttggtccttccttcattgtttgtcttaaattcatagaaacagcaacagaaaaattggtgataaggaataattgtagatcttagcaatcattatatcaagaacaaccagtgaaacagtgacctttttgggctttgatttaattttcatgctattatgaggtcaccaatattaacaattggtttaactaacctcttttcgaaaagcttcttctttgtct

SEQ ID NO: 3884 - DNA, 1275 bp, Glycine max
aattccacgccatgctagtttgtgtggaattctaccaacaattctcctatgtgacaaacgcacacatcaattttagtatttacctctcaattgagcgaggggtgcattataaatttcacacacacacatcaattttagtatttgcctcgatcgagctaggtgtgcacaaactcaataaatttcacatacacactcatcaattcaacgttgacctagatcaatttaggcatgcactgactcaatatatttcaccctaattttagtagtgaccacaatggagttagacatgcctgactcactaaatcatttatattatatcattaattatgattaataaccatgacttgcataaccaaacaattaaaatcatctaatagtttgcctgaaatatactttatccattccacctactttatacgacattttagaagaaaaaaaatatttctaattatagaaggctataatcttttttctcttaaaattatagaaggcaatacaaactaaaacatagttaggccacttttgttttccatatacacgcgggtatctttgaaataagtttctcaaacatatatcttggaaattgctacaccatctctagattcaattccatgagaccacctaaatacagcatgcacttggatcttcgtttgctgttattttatgtcgttcatgctgtagtaatggtctttgcagcaaactctgatgtatgatactgactcccattctatcgatttgttaattccctaaagctcttgcatgtgtaactagctagttttaaagattactctcattaattaaaattatctaaatattggttcccattttcttcttgcttttaggggcctaggcatcaatcacaagactggttaaaccacggtggagatttgttcaacaggcgatatgcttacaaagagcgtaagatcagccccaaaacagcaccgaacctacgtttgaagtggaaattctatgcaggcagagacatcactgcaacaccagccatatatgatggtaccctttattttccaagctggaatggaaacatctatgcagttaaagaagccgatggatcacttgtttggaagcagagcttgcagaaattgacaggtctgaaagcacctgatggccttgttgagaatgtaaattcgacagtgtcacggtcaactcccacagtggctggggatttactgataattggtgtctatggccctgctgctgttattgcactcaaaagaaaaaccggtgagcttgtgtggaagaccattttggattacc

SEQ ID NO: 3885 - DNA, 1267 bp, Glycine max
atacacagctgttataccttttacgtgaatatggtttcatgcaataggtgctgtgaaatgagatcatgttagattagcatgatgaagttatgcatgtgttataaataggacctgtacctaagtaggcatgcagccacgtcctgagcactatcttctgatgcgttataatttcaaaagataaacacgcaaaaagaaaaaaaaagaaggaaaaacacccacaaattttgaaatagtatattccgttttatactgtgtttttctcttttactgtataggaactataccacagaggatatcattttcagagatatctcttatccttgctgcctcgtattgagtgggaaatgttaccaattaatcgtcaagtccattgcataggttctctttgaaagttaaaagaggctacaaaacaaacgtgtcaattatataatgaggtcgattttagaatcagaacaagcaagagtaatggagtcaaatccagaggcttcaattcgcacatcaaactctagcgaacaatttgcgcgcgggcgcgcatatatatatatatatatatatataaaactaaggaacaagtggacggcgtccgtgacccttccacatactgaaaaataaatgaataatcaatttttttaaaggtgaataatcataattaagaacaacgtatctttcttaaaaaaaagaactacattatctttttcttttctgccctcctcgttatggtatataatttaacgacggagtcaatgggtctttcagtttcatgcttaataatgtggaatcttaaaatttccacgacagagagagtaaatggtacttgttttttttttttttttttttctatgggactaaacttttctttatatattctttatgcatatggatgaaagacatctaagatcataggatctccccagtttcagtaggctcaaataataattggtcccttgcccaactttgtcttgttgcaaccttgtgatggttggggacatattcctgaaaaaaaaattaaacaaatgaataaacaagttcactacttgttacctacctacaaggctaccatacaatttagttttctcgtcctcttcaaacatgatgacaatcagcatgtctcgtgtaatatcgtacctccattctctttatgagttcttctgctgtgtctgctatgactacaatatgccttgcagagttgtctataaaaccctcttccactcccttgtcaaataaggacagcaagctgggaaatacccatctacattcaacaaaccca

SEQ ID NO: 3886 - DNA, 1106 bp, Glycine max
aacaaccaattccggttggatgggaggagattgtaatagaagttgccgcagagatcctagctgatccatcattttcacggcaagaaacttctttttctatcttatgttttataatagagaattagaagctaacaacatcttatcatttgggttctgaacacaactaatatgctttacttctattctttttaagactgacttatttgaaggcagaaacaatataagtagcatcgttttgtaacttgaaaagtgtcgatcagattatggtttaagtttttaatttgaattttgttatggttttatcagcttactctcaatacgagggaaatttcaaatgcttctcttggattttgtccacccgaaattgattctccaggtaataaactaataataagagtccataaacaatttattcaactcatcaaaatagtgcataaagtacattctgttcaaacatgcagaaactcgtgggacatctcctaaaaagaattgaggtcagcttaagaagggagctttactactggcatgcttattatgtgagtttcttcctccataatttgtcttaaggtgatggtatattataaaatagaacttggcgcatttctaacataacagttctgtgctccttccccattttccctaaaattctagacaacccccctccaccccatagtttatgtgtgtttcttgtggtaaattagtaaccaaagtctataatgaacaggacagaagactccccccaggaataactgctttactaaagttagaaggtaaggcaaaacacttctaatcttttttaaactaaccatatagattgcctagcaaaaataacccaagaattaaggcatacatggttttaagttgcgacccgcaaccgcaattgcagccacaacttaacagtttcttgactgtccccaactgcatcgcaccgcaattgcagccacatcagtcacatttttctgcaattgtccgtaatataaaagttttttgacttaccgcaaccgcaatttaaaaccttaaatatgcatgacttccctaaataacctactgagatgggtatactgttattgagctaatatgctattctctgcaggtcgactctagag

SEQ ID NO: 3887 - DNA, 1320 bp, Glycine max
gaatccgatgaatcgtcctctgtgaagccactctgtcttacatttgccgcccccctcatcaatggatccctcacagtaccaggtttgccaaccagtgtttccctggaagaactgacctcggaatatgtataatcacttgcataccggggtcgagtgaggttcccatatctcctagcagcaccattgggggggactcttcggtcttgcggtgacgaatccaatgaatacctgccaccataaacctcctcctccgattcgatgctgtcgtcattatcagaatttgaaccgctgtcgccagtctcacccggcatgactgttgacacagggattgcattagcaggaagatgcccacttctgaattttgctgggggtggcaacccaaaccctctgccagcaccactcttcatcccactgatgggatcattgcgagatctcaatgcagtgtttgagaatgggacttccttctaatcaccaacaaagacaaaaataatcagaattttcacaaacactaatgtgatctcaaggtggacttggagaatgaaacttccctctaaacactaacccaaaaaagaaaaagaaaaaaaacatcacaaccttacaaccttacaaacattaacgtgatctcaatgtagtggtaatgttggtccagaacaccaacacaacaattaaaaaaaaacaaaactttacaaatattaagccgaatcaagaaaaccccattttgatataccgttaaaaaaatcaatctttgagaaagaaaatcaaaagggtgtggaattaacgagtgaaggttacctctctgacccatcgaagtgcatttctgtcaaggccttcggtgaacatcttaacctaaccgttgaaatctcaaacaaagcaaaaccccttgatgcaaatgcacttcttcaaaatgaaaggcctaacacaaaaaaaaaaaaaaaaaaaaaaaacgaagcttttggttaaacaaagcaaaagggtgctacaaggaacgaaggaaactatcgcattctgattcagacatgtataagaacaccagttttaagagggtaccaaatggcaacaaaagacgaaacactcttgtggagagagtgatggagtgaatagaaactagaagaggattatggggtgcgagatttgaggggagagaaaaaggggtttgcttactcaaaaagcttcctttggttagcacttagcactcactaactcttagagactgaaacaaaagaaatgacccacaaaaactcaaaaagcgttgttcttctatgctctgctgcggcttgtctcctttcactttggtgggtttgcacgacaggcaggcatgct

SEQ ID NO: 3888 - DNA, 1246 bp, Glycine max
aacttcctacacatggaaggccaatgtggctccatgagagtgaaggtgggcacactgtccgttcaaattttcaaaatcatatgaaatactgtgatgtcgtattcgatccaatgctcaaactatttgttggggtttgattccaataaaaacaatgaggtatctatttcttcttttttatttaaaaagacataaataaaaggaaattatccaaacaccaaacctagtttcaagggtaaattgttactgtgcctaggttaggaaaatttggtagcatttgaaccatttgataaaattttaaatggaatccagttgttaaagaagcttgtgaggaatctgtttttataatgaccgaagggggttaaagaactacggttaaacaatgaaactcctttgtatcctgtgtgtataacatgcataaaacagtaaggaaatgtttgatttgattattttttattttcatttttactgaaaacgaaaaatggtgataaaaatgtgtttggttgaatttctgaaaatattttcagtgaaaataaaaacagaaaataatcagaaaatgataacagaaacctcatttcggataaaataaaattacggtaacaatgaatgtaattttaaacaaatctaaaaatacaaaaagacaagaagttaatatatcatacattttcagtatttttatttcatgaaaacaaaaaacaagaagttaaaccaaacatgttttcagaattctttcttttgaaaatgaaaacaattttcaaaaaataaaaaaaaaatgaaaatacaaattaaacacacctaatattttcgacatttttactagtacagtagtacatgtaccagtctgatttatttgtttctatttggaaaatagttattgcaggaaatttataaaataaaataaaaaaatcccgaggaaaggaatgtgtggattgaattacaaagataggactcaaattcggttgtacagtttattgataactgaaaccaatgtttacaaggtttgaccagagaaagctagctctatctgtggaagcactaactcatgtcatcatcttacacaaagcaccaccagagacaactacttctccactatgaagaacctttttcttattctccacaaggaacgctccacctggccaaactattcacaagacaacattcttctacaacaaccttgtcataccatactgaacaggtccaacctttctatgagcagtggtactaatcccaccatattatgagccttgac

SEQ ID NO: 3889 - DNA, 973 bp, Glycine max
aagtagctgccttggatagcttgaaattatacctaaatttgtcaaacaataacttacatgggtctttaccattggagctcagcaaaatggacatggtgctagctattgatgtatccatgaataacctctctggcagcgtccctccacaactagaaagttgcacagcactggagtatctcaacctctctggtaattcctttgaaggccctctcccttattcattaggaaaattgctctatattcgagcacttgacgtgtcttcaaatcaattgactgggaaaataccagagtccatgcagttgtcttcctctctcaaggaacttaacttctctttcaacaaattctcagggagagtctcacacaagggagcattttcaaatcttaccattgactctttcctaggaaatgatggtctctgtggccggtttaaaggcatgcaacattgtcacaagaaacgtggttatcatttggtgttcttgttgattcctgtgttactatttggcacccctctcctatgcatgctttttaggtactccatggtaacgatcaagtcaaaagtgagaaatcgaattgctgtcgttagaagaggtgatttggaggatgtagaagagggaacagaagaccacaagtacccaagaatttcatataaacaacttagagaagccactggaggcttcagtgcttcaagcttaattggttcaggccggtttggacaagtctacgaaggaatgctacaagataatacaagagtagctgtgaaggtgttggatacaacgcatggtgagatttcaaggagctttagaagggaatatcaaatcctgaaaaagataaggcacagaaatttaataaggatcatcacaatttgctgtaggccagaatttaatgcccttgtttttcccttgatgccaaatggtagccttgagaagtacctatatccaagccaaaggttggatgtggttcaattggtaagaat

SEQ ID NO: 3890 - DNA, 1004 bp, Glycine max
acaaaataaacaattatcagctctgtagtttaaaacagttatatttgtcactacgtgtgcatctaacaaaattaaaaatcatagcttgattcaattgcaaattttgcacatttatggtagtttccgaacaacttgatccttaacaatagaagaacacacctgaaagtttgatgactaaatggtattcaactattcactcactcccaaagtcttcataactcaagccttctgatatggagtccagcctattgttgtctactttaaaatcaagacaacaattgatattagcattgaggcacaaaacaacagaatacaggtgaggcgagtgagattgttttttaccttgttctcctctgtcaaggaagttctcattatccgtagctaggaagggtgacctagaataggtctccagtatatctgtcaaataagaagctaaactattagggctaatgatttatccaatctaggttgttacttgaggatacactttgtatgtaatagcatgaaaaatggattgaaactgaaaaatcaacatgaaacaaagctttactggcatttttacatcaccatcagcaaagattcacttttgctgatgaggagtagaatgcatgcatgcagatgcacacaaggacccacacaaacatgagagaagacataccagaactctgagaaaaatcagcagtcagatctgaaaggctaaaatttctgggaatctgccccagaaatccaaatgaagaagtgtctggatctaggactgcctcattcagagaatgtgagttggactcgacattagtgaatgacgtaactgaagcaccaccaatagttgggcgtgtctccaggacatttccttcagtactaaacatataaggagaacaaccagaatatccaggctcagatttgatcattccgccaccattcattccttgtatcagacccatgtttgcgctttgagcagaaagcacgctagcagggccattaatcctattgccatgaacagacatatc

SEQ ID NO: 3891 - DNA, 1062 bp, Glycine max
aacttgtgattcttaatagccttctcacgctttttgttgtcaaaggttaattgatgcagctttccatatagcagataagcactatataattacgtatttcaaactacacattagtaattatgtcaggacttttgattatttctgttggtcaaatttagaatatggtactaagttaatctatagtaaattaaactaaccctttttgagattagatataactctctacttttttttaatattacattgacatccttatacagttatatatatatatatatatatatttaaaataattaaggaagatttatatgtataaaggtgtcaatgtaaactatatatttttaaatataacaaaaaagaatagtgtaggggtatataataagaaaaaggtaacgggtaaatttgatgaaatttcaaggggttaatataatttaatggcattcaactgggaaagcaatgagggatgatattgattggtgcgttgttggcttctaatgtgtccaaagatgtgttacggaaaattgagcaccaaaagtacccatagtggtttagagaagttactgaaaatgaaagcatgtggtccactctgtttgatcgatctccatttctttaaagaattgaatcaaactctattattaacatactttctggttccagaatgaatagatataactagacttgttttatctgacaacaaatattattccatttgataaggacgaaacttatgttcaaattctactttgttagttaatgtaagaattttattgatagacgatttgaatgtatttgagtacgaattttttgaattgagactcaaattaaaatatgtctaacctgatcagtgaattattgagatctaatttacctatatatttttttataaaaaaagaattattttatctaaaccttttgaaaaattaactacttatacatactttttcaacaactactcctaccttagtattctgacctagggcggctcaattttcctttttttatttatcagtatgacatattaacaaactcggctgcaggacatgcaaggctggcggtaaagga

SEQ ID NO: 3892 - DNA, 930 bp, Glycine max
aaaatgtatccagagactctacatatgttgtgtaacaattcagagctattcttcttggcattaagcttgcttggtcgagagggtataggaggattagagtagattcggactctcctgtggctattaatctggtgacaaaaggttgttgcatgcttcacccttatttcaaccatgtaaaggagattcatgcagtccattcctatgagggtgatgttacttggagccatattcttcgagaagctaatcaagttgcgaagcaagttgttatagctttggttccgtttcaagtttttaatttccccctaggtgtactgtcaatgtgttgagagctcatattgctcacgttagtttccccagagggttctaggcttttagcctttgtaattcgccaaaaaaatgtattttaagaaccactagaagacacaatgaagtccacagcatcctgaattccccagggggaattaccttccttgtgtttgctagttttttttttttgcttaattaacctatgattgactgattgcagatttcatcatgtcaacttagaaagttacttgaactttaccatgcatcaaagaagtgaagtgccaatccaaaagtcaacacaggacaaacccagaaaaagaagatccaaggagaatgcggtggtcatagatccagatagttgcagttgttaaattgcggggaccttgaccagtgtgatccactgtccccgcaatttaacatgaagcaccttgatagatgcatagtggatcacatttttctgatgatgggggaaacaaaacaagagaaagcaaacagaaacaactctaggacctcaaggatgagaatcccattacatcggctgagaaaatattaaacaaagctgctggacaatatgtaaaagctgcaaatcatgggttgaggccgagtcttgttttgcaagccaat

SEQ ID NO: 3893 - DNA, 1272 bp, Glycine max
aagttaccttcacaagcaacaaactccataggtttgccagcctcaaagtatgtgggatgaacatagtgaagcctcggtgccagcatgttaacttcaacttttgtcacagaagttccatctgtaaccatagaaatgtgcttgttgaaatgatagagttcaggtatagagggaaaaaaacatgaagatacaaagactgaatatatgaaaattgatattgacttgatacgatacgatgtgttacaatatgatacaaaacataaagcaataacctctatttacattaatactagatcataatcctaactaaataaggaaacaaatcatgaaatattaataaatagggaaactaatccaatagaaacttgttattgtttaatttgttttggaaaaattagaacataatgcacatctccaagatggaggataaataccctacaaaaccattaatattgtcacaaggatcaaggtataaaatactaaaagtgagtaagccaaaaagaagatatataacgcatacataatgaacacaaaacagcaaaaaacctttcataacacggaagatcatgtcattcagatgaactaatgcggtgcctcttccagacagcatctttccaggagcaacaaaatcgtgcacatactccaaagagtctttcaataactggttggtccataaaagagaaagaaaaaatgaaatcaggagaaaaaaagttaacaaatcaaagtccgtaaaaacttgaaaaatgagggaaagcaaattttcttctattttagttgaagtatcaagttctagaatcatcaaattaaaagagggaatatgtatcagatggtatatagtaaatactaattagtagattagagcacaaataagcatctcaatcagcaaaatttagcaaaaactgcccagaataatgagcagaacaaagaaccatacagtttattagtccaatattgtggcaggtaactggtaataagaccacttaaccatgacacaagaaccacataatgtaaagaacatcaagttgaacccttacagttatccacataatgttaggcattgcaataaaaactgtcaggatcgtacacccagggcggatatatccttccaactctacaggcatatttgccaaccattggaatatctgcacaaatgcaattggctgcctgttaatcagttacatacatgtacatagcagaagatcttgccactattcaaatactaaactgcaataacaatgctttaaaatacttggtgtcgtagccttctaggaaatt

SEQ ID NO: 3894 - DNA, 1275 bp, Glycine max
agagataagaatttgctgtcgtcattcatttgtttccttacaaggagaagattcagttctaacagccaataatattaattaacgtgattaatatgaaagttagatgttgctttcttataaaatcattgttatgactggaactttaaactaccatagtaccatcatatataaaatagagactctaacttgcatgcaacacaaatgatatatttagttattagtaaaaggttgggacaggtaagttaaccggtgaagtttgtaaagaagtaatatactattcataacatcaaaacttatgcgacattcctgcttgtcaaattgaaaaagtaacactctttgttcaatagaaaatattttgaaacaattcccatcccaaaccacgggtgagaatcatgagacgagatggcctttatgtctacttccaaatgctaaaagagaaatattatatattattttcatacaattttttataaaataagagagagtaatgaaaaatagaaattactatatagttttattacatgaataaaataaaaatatactagtaatatgttgtttcaatatactactctttactagtatatttcttaatattgatttgtactttaatgaaaatcacccaattttaagttttacttttatttaatgaagttatgcttatgcttttgattttttaaatattaactagtaattaataataaaaatatatattagagaatctgtttgagatccctaatcttgaacccaaatacactgttttaaaattgttggagccttggaggatatcccccatccgtgcatctgatctggcaccgacccttagggtatgtcttgccctgcgacatgcatgttacttcatgtttcataaagagaaaattaccccttaaattacagtataagccctgagaggagaggggtattctcgtccacttaaatccaaacataaaaataaaacttactgtcttttttaattgcaggctctctgcccaaagcctcttgtctgtgtgctacttctctttctccattaccattgctgccactctactaagagagagagagagagagagagagaaaaatgcagcacatcacataacctaaaatcctcaacaaaaccccattccttaattagtaaactgcattatctctctctactttagagtagagagattccgattcaagttcaagtgaaggtttttgagttttgacccaaaaataaagtacctttggctcttgccagccaaagccagagttcgagggcattaaaataggcaactt

SEQ ID NO: 3895 - DNA, 1251 bp, Glycine max
tgggaaacatccttttttttatttgataggaaaaaagttgcgaattgaccattgacaaataagtgaaattactctgcatcttctttctgtgttatgtatttttcttttcacttgtttcagagtatagtgatgcataataatagtatagtgatgcatccgcctcgcacatcttataacttgtgttttgatccacgttgaatggaagttctaatgcataaacgtagaagcaaattagtaagaccctctcgttaaatatgtatgaatttagttgaactcaaactgatatgtgtaattaaacacacttaatagtcaagcttggttatataaagtattaagggtctccagttatttaaccgtttgagtaataattagataaaaattcacatcttgtttttctataagacatataatgataatatgatatgatagaatgtgaagagagaaatcaaatgtacaaataatgctaccaggtttgattggtaataatccatttataacaagtggaatatgtgtgaggtatctaacgattattgccaaaaaaaataaaggtatctaacgataattctatatggtttgatggtatataacaattatatggtcattttgtttaaatttaacattcactaattattagcggatcatttttattttataaaatgcagcgataaagattttgtataacttaatttctttcttaaaataattttattttattaagttctgttggggatggttgtgaatttttagatttttttattttaaaatgtaactttaaaagcaaaatatttttaacaaaattgaggttgaaatggtttttcacctaattttaaaatacttgcatgtaagtttcaaaaatcaaaaaacaaaattctattaaaagtttgaagttttttttttttctattcttccctcattgaaataggataagatcaaacccttatttccaacatcaaccagacatcccaactctacccctagccatcttgccaccaccaatgcccataatttttcatgatattatacatggattggattagatatattatggcgaatttatcgtattccattatatcttctacaatagaaatatgataagtgagatgtgatggataaatctgcatgaaaaaggagcaactttcgtgtagtttgtgattggatgtaaatgttcacattgtcgtcacggaaaaagattcatgtaaggagaactcttagattagattctaaagttgcgttttcgccacccacctagct

SEQ ID NO: 3896 - DNA, 1199 bp, Glycine max
atcctgataagcttttactctttatactaattgctgcactgtcacaatttaacagtctttttgtggttttaatatggatgttgtcatgtgatctgtgagtattaattatagtctaaatgttactcacttttactttcaattgctactcgtaatctatttttcagagtttgcttgtgagatgatatactagattcagctttcacaaattaaaatgtgaatcagaagctcattgatttatttaaagtaggttgtctgctattctcactgtttttttttttcatctttaacagaacctgacaaaaacagcttcaatagcagtgtagctgatcagcaggtaggtctgatactctgggtttcaatagttgtgttgaattggattatttcagctaaaaataagctgatgtttcattgtgtaatgtgtataaaatgatgcctggacgtaatccatgtcaatttcggtttcaaatatttcatgagaagtgacatgagtctatatccgagatctatttttccctctcaaatcttcacccatcagtttagaagtctccattagtgtttgcttattgattttattactatctatagtgttaaatatgaagtttttcattctttttaatgttcctctagtcatgtacgcataatataactccaatgctgatgtttgagctatttttgtcttgatgtagctgttggacatttccatattgtgctaataattactttttcttggcttggctgttaaaattatattgttttgttaggaaaggaggaagagagaagaaagcaataccaagaataataagattatataatatggtgtataatgatggtatccaaaatatcaaattactaaccaaatggtccttttacagtaatataattaaatccaaaacaattgtagtactacttgtataagcccaaatccactaataaaaattatatgataagactactaacccttattaaaattaaaatatggaaaccaataaggagatataatgaaaataggaaacagttcctaagattactttctcaatgagatgactaatttaagatagtctaaaaagatatactgagtatattatgaatttacgatatattctaatactttccattttccccctaattaagtgactgtgggtagacagattattcccacttttaaatgttaagatgagttttgaccatctggtcttctt

SEQ ID NO: 3897 - DNA, 1220 bp, Glycine max
agcttgcatgcctgcagacaaaaggtaacttccttcgtccactacattgctaaactctccgaacccttttttttttctctcttaccaaacacagtatttatttggttaccgtattgccatgaatcgtttgaatattttaggtggtgagttttagattaacacaaatacatattagtcgtgtttgttttgttctttttaccaacattatcttctggtttaagtggcaagcagtattgtttcccttaattaagctcttcgttttggatgttgtaaatggaacaaataggcacttgttagagttatgccagtgggagtgggttcacctgattcctaacttgatttggatgagttgaggcccatagtgacttctagatactaggttttcaacagagtgacttctagtggtctcatgagggtttggtagtattttgttttccgtttccttcttctttctcctctgtcccagcaagataactagtgctttccatgtgggtaggtgctggttgatattgtaaaattagcacaaaaaagaggcttaaagggtaatctgggaggctggaaagaattcttgaacagtcatgataaaaagtttggggcaggtttgagtgatccatcaaagagatcccatgaggtattggctgcatttctaaagacattttcaaaggaggaagatttaaaggtaaataacttttctgtgccctatatacacactcatacacttaaagatgcgagtttcatacatttctcccctgtgctcagttttttgataacatcatgcgacatcattcaaatcaatatatgttggagcgactgaaagataaatctcatgattcccctgagcaggtatgttttaatggtgattgttctgctattttgtcttgttttttaaattactatttacatagttctcacttataattttatgaattcttgttttcctgatatatattatctgaatcatcatgctgaataattgaagagactgcaactgataatggcataatacataatctctatgatttagcaaagactacttgctgttaattgttgtttttcttcttccttggttttgtgattgataatggagtgcatttgaatttcaaattaattagtaaaaatcttaatggtgtcgatttcattgacacctgcatttgtaataattttactgtcatttttgtaacctgctgatgttggcagcacagaggctagtccaagcaact

SEQ ID NO: 3898 - DNA, 1153 bp, Glycine max
tctgcacaatttctataaaagatagcccaccagaaaaaagaaaatctaactcttcccccaaagttgaacgtacatcttcggtgttttaaaatcaaaatttgacgattgaggtattataatctgagtcacgtgaagtaacctactatattaattatgcctttttaattatattttttttcaaaacaaatcaagttataaatttagtcatagaagaacatggtataacaacttaaaaaaattgcctgcataatagagaactctcaaatcccaactgatgactaatatacacattatatgaataagctacagtttcaaaaaattgtgaaggttcaaggtattcagaatgcgacaggaattctcatttgtgcaatgaagattacctgattaacaaatgttctctgaaaggggcttttatcagcatttaactgcaaacaagaaaacagtgcccataagaactgcaatcatgacagaccatagaaaacttttacacccgcaacatcaaatcaataaaatttagaaggccaaaaagtatttctactatacaaggagggaaaaaatttagtttgaactttgaatatttcttaaatggccatcaaaattgcacccaaaatatctttataaataggaacacagaattgtatatgatatatgatattacaaagatgcagcattgaaaagtcaaaaaaaatatccccaagcgtttgagagaatagaaaagaattggaaaactaacataattccttttttaaatccagcatatccaataatgcacagcctagatcttgaactcaaaagtgctacaactctcaagacatataccaattctcacatgttgcgtggacagatctctaccagttttaaaccaactactgaacgagagtcctcttataacattctaaaacagatgctaatgacatatactaataacaacaacaacaattctaaacaaaaatagtccctgacacaataagacgtgagtaatgaacatagtcaaccataagtgaaaccattatgttctgaattaaattactagaggaattcagagttaactacagcatttgaatacgcattgacatgatctaacttaacagggaagccaattaagaaggtttcaaaagagagcaatgatctactaggtggatgcaagttggaa

SEQ ID NO: 3899 - DNA, 1001 bp, Glycine max
ggttgattgatgagattagtgaaagtttgcccaaggcaagttgctatttaactttgaagcaatatctatgcctaaaagtatatccatgcttattaggtggattttgcttagtggaccagcttagctttcaaaattgacttagtgtattatgattttgtactccttaaaacttcggaatgaagctggtgtatagttaaaatcttttgaccaaaatttgattggaaccttaaatacatgttaaattcagttatattgtgaccatataaataaactaagtcgtctttttccttttaactagacaatctgttgattgcttaacccagaaatcattgtggtctaagaaaacctaagttaggaaaagtataggtttttatgcttacctccccctccccaggaaaaaaattcatgtagcgtaaaagattacttctttagttggatcaggaaatcttgcttaaaatatggtggattcaagtgataatcctccagtatgtttcatacctaatataaattcacttttttgttatagtcaggttttcatgtcatgatggtagtttatcttcagtttctgttagtttccatggacttttatattgtcttttgaggctggaggcagggattgaatatttgaattagattcacttggttccattatacactgcattaaaaccttgacctctttttctgtaaatgctatataaagttttacctagttatcttgttaaccttattattttataatcattcatgacatgtacaattttgacttgcataatttttttttcaaaaaacatctataaccacaccttaattgatatggttgcgagctatggtttgctagcatgactaatatctgtttactcaacaaatttgcttgatatatgttggattttggaattttatgtttctcagtcatcattcttggattctgttttattttctccttccatgttttccttgtttgctacgtgatttatgattttgtttttttgatagttaatatt

SEQ ID NO: 3900 - DNA, 1019 bp, Glycine max
aacatttactattaggaaaaaataaaatcataaatcacatagcaaacagggaaaacatgaaggagaaaataaaacagaatccaagaatgatgaatgagaaacataaaattccaaaatccaacatctatcaagcaaatttcctgagtagacaaatattagtcatgctagcaaaccatatcgattaaggtgtggttgtacatgttttttgaaagaataaaaaaaaaaatctgcaagtcaaaattgtacgtcataaatgattataaaataataaggttgacaagataactatgtgaaattttatataccatttacagaaaaaagagatcaaggttttaatgcagtgtataatggaaccaaatgaatctaattcaaatattcaatccccgcctccagcctcaaaagataatctaaaagtccatggaaactaacagaaactgaagataaactaccatcatgacataaaaacctgactataacaaaaaagtgaacttatattaggtaagaaacatactggaggattatcacttgaatccacaatattttaagtaagatttcctgatccaactaaagaagtcatctttaccctacatgaggttttttttttttttttgctggggagggggaggtaagcataaaaacctctacttttccaaacttaggttttcttagaccccaatgatttattggttaaacaatttacaaattgtcctgttaaaagggaaaagatgacttagtttatttatatggtcattatataactggatttaacatgtatttaaggctcccatcaatttttggtcaaacaattttaaccatacaccaacttcattccaaaattttaaggagtacaaaatcataatacacgatgaagtccattttgaaagttaagctggtccactaagcaaaatccaccaaataagcatggatatatttttaggcatatgcttcaaagttaaatagcaacttgccttgggcaaactttcactaatctcatcaatcaaccaccgacaggcatgcaa

SEQ ID NO: 3901 - DNA, 1233 bp, Glycine max
tattataatatattattatttcgatccattgctccaacttgtgctatcaattttaatgtactgaaactcttcttcctatttcgatgctttaacttatcagcgctcagcattgtcttttgtgaattgtgacctgcaactagcatgacaatggaatctataagcaaatttcattagataaattgcttcgtctaattcattacggaaataacctttttatgttatttaggtcacgatttggttatttctgacatctgaatactgcatgtggcctttttttttttgtgtaatactattaatgaataggtagggtgcgagtgccttcagttgggacatttttttttgtgaaaggataatgataataatatccttgtctggcattatattgcaaaggttaaactgttcactggtcctcatagttgtcccttttttaagttttagttcctacatgagaaaactgaaagtttcagtttctacacatgcatacaagattaagtttaggtccctattgataatatcagaaaactttaggtgtaactttgctacaaaaactttctggtggtgatcaactgctacaaaaaattgtgtaaggactaaaacttatataattttcttgtataacggggacagctataggaatcaaatgaataatttgacttattgcaaatcgtcctaggtatgtgatgatacttttttttctctcgggaagttttgacttctgttgttatgttctccattggtttgatggttaaaattctgtttattgcagattatatatattgtgataattggtgtaacatattatttcgttgcgaagtcttgctttgcctatatccctggatactatctaagtggaattcacaggtagtgtacttcagggccaacacccaacgttgtactctatttttgcttaatggtttcttcagcattattctatcctgaattttgttagaccttatatttttgtttaggtacacaagcttcttggcagttgctgttggaattctgctctttcttttgaccagcttttctgatccggggacaataaacactgagaatgtttctcactatattaatgcttatccctatgataatattatttattcagagaaagaatgttcaacttgcaaaattccaaagtgagtttgctactattgcagaattttgttgaaatattggttaaatctatttataaaactgtcttaatttttttatgcagacctgctaggtcaaaac

SEQ ID NO: 3902 - DNA, 1055 bp, Glycine max
cttgcatgcctgcagttgcttttgtgtttgtcttttgcttaactttgctcagtattgaagtctctcctaattagtatactatttcaatatcaacacgtattggtttctctgaaagacgaactttctcttatttgtcttttttagttttcgttttcatttggtactgtgggaaaaaggggactagaattttttatttttatcatacgtgcaatgaaccgccccattgcatatttatctatttggtactgtaggtgtgatgatcgcaaattgataatattattttattgtttttgcagcaatatgaacccggatatacagctcctccgccaaagaagtctaagataaatgatgaaacaatgtccattaggtacttttccattcccgcgttcaatttaatcaaagtgaacttataactaattatttaatcaatcatttcataatgtgaattcttgactttgctacgtgagagggagcaactaataaaatatgttgttgagtaaagctgagaatattattattatatttttaaagggaggaggaagaaccgtcaaacgcaagaatagagattatggttgaaggagtggaaatggaaagcgattactctgaatgcagttctgccgctgacagaagcgcgtcttgctgtcgatcacttgcaatagctgtaagcatacatcttattagcttttttattttcacgcgtcgtgctttttaatcaaattcattcatcttaatattagccaaggctaactggcagtggcaatgcgctagatacatggctttagttgtgcaataattaattaagaataaaaccaaattgcatcctcaagtgagtcaaagtccactcagactccttgtcgcaattgccaactgcattgccagtggcgttccactggcatggctccaagagttgaaattcacatttttctctttcaaacaaacttgtcttcttgatgtgactgttactgattaagagggaacttcttgttgactcgtgttttaacctgatagttggaatttctcccaacctatataataatttttttttaaccatttga

SEQ ID NO: 3903 - DNA, 1188 bp, Glycine max
ttgcatgcctgcagcacttatcatttaaggcagagcactggacataccaccagctaatcctcctaaaaccaggccctcaactgaattattaacatgccaatttgggctagatatccatctttgctctacataatctttagcatctttcaaagcttcatagaacacaacctatagaaagaaaacaacaatagcatataaacagtattcaaatgcacgaaaagagataataatggttaggagctatgaccttatttttcagaaatcaaggccaaggtgatcactaacacacccatctataattacgtgtgttcactccaatagacagtaaaaatgcagcagttcctttaacccatttaagagataaacaaatatctaaaagcacaatattataaatctgggagactatatgcactatgtagtgtttttggataacacttccattatagaattgaacaatattcatttgaaatgaaatggttcactaatactatcacaagcagaagactttaaaaataatgatatatcaaagaccatatgaatttaaatcttatatcatttcaaacaaatttcatgaaagcgctcttttattatttcttttatattccaagtaaaaacaggaagaaaaatgtgtttttttggttcagaacaattgctacaaaagatctctctggtttttcaagtacaatgtctttgagatttaaaataacataattatctatttattgctgaaacaaataccaggtgtggcagatgaagtaataaatcagacccaaaaaaggaaagagcatcaacaaaaaaagggtttcaatatggataagaacagcagaccacctttccggatcagctctatgaagacaatacttgatgtcagaatatacaaaatgtgtccatgctttcaaacctctatgtccaataataaaaatattccttacttgaaatttattatttccatagcctatttcaaagtttagctagcagtacaaaacagaagataacttggtcgcataagacaaaggacttttcataaaaatgaataggaactcaacaaaatagtataatatacttaaacaaaaaacaaaaaatatatataacagattatagaagagtggaagtagtaaaatcatgtgggttacatataataccattaggccagcaaatggaacatcccttgccaatgtagacaaatat

SEQ ID NO: 3904 - DNA, 1262 bp, Glycine max
ttgcatgcctgcaggaggtagcaaaccagggaatatccggccatactttcaacaaagttcctctgaaacaaaatcatgtaaacaaatcatcaaattgtatcaaatgatattatcttctctatttttaacataaaataaaggtgttcaccatataacaggtttattaaatgatgaaaggaacaacattcaaaataaaaaggggagtggggggataagcctttaaattcaaaacctgcacgaaatcacacaagaaaattatgccagaaaaaaagggagtggaggtggggcagaagtagcaaatcacattacattgcattttgctagtgaatgtactgaaagaaaacttacagtggtacatcccagacaggagtaccttggagaaggggcaaaaaatgaatacaattggttaataacataaatgtgattttgttttcggatgcttgtcacatgccataaatatctttcagagattatgtcggattgtcaatagaaaccttttcagaacaaagatgtacctatgttaaactacgtatttatgcaatgttagtactttggaatctttttatgtggccaggttttctaggttgaattagaatttgatatttagcctatgcattggtaatggatcatgaggtggattgggatcttgtcacaaagaaggataagaaatcctcctcagataaactaataggaaaataaacaaccattataaacatatttctattcagctattttctttatgtcaatgttttgcattacctgggcaagtttaaaacttggagaattttcttggtatttggcaatgaaaaattcacgtaaacttgagatgttgggatatcgactcttgatagaatgtagagaagcctacaaatcatatacatttaataattagtaaagaaaaaaaatatagatttttaataaatttgaaatatgtaaccatggaatcaccgtatcaggaattgtttcaataagagcagtgtaagaagaagtacataatacttcatatgggcgcagccagagaggtaggccagcttcttggaaaatatctggtatcaaaatgtaatgatagtaagcaacatgacaagaaacacagagaagagtctgcttcatcctactagggtaacctggtatcagaatatagtaaaacaagatttaatcattaatcatcaactcgtatcagggcttaaaattaatttcgcaaagagcagttttggggcaatcgggaagtcggaacaatggaagaaggttgctgcaaaatactt

SEQ ID NO: 3905 - DNA, 1054 bp, Glycine max
cctgctcctccacctcctcctggggcacctgctcctccacctccccctggtgcacctgctgctccacctcctcctgctaaaggaggtctaaaatcaggcagtccatttccattgtctctttctgtgagtggtgatgggaataatgtgtcaggaccaactagttcaaagggacgaattctatcacgtacgatcagctcaaagaataacaccaaaaagttgaagccattgcattggttgaaactatctagagcagtgcaaggaagtttgtgggctgagacacagaaatctggcgaagtttccaagtaatgttgattggctatggtgtttcatttcttatgacaagtcatccttctattattctagtgtcttacacgcctccttttattatcttaatgtagggccccagagattgatatgtcagagcttgagagtctcttctcagcagcagtcccttcaggtcctgccaaaaagtcaaatgtccaaagctcagctggccctaaatctgataaagtgcaactggtaatttagattcagtttgcagtagcactgagactgcttacggatatttacataatctgcttgtttataactgaatgtgatggggaagtgcaagagaactaattactaggaaaatgcaagaaatgtgatagttcctagtaattataacccggggcatcaatgttggttctatataaccataaagttgtaaattgtgtcatctgttatcttttcatcgatggaaacttttagagttgataaactgaagtatcaaagttaatgttcacgaaattaattactttggaaaattttagtatgatactattatataaccaacccatcttaaaaccagtagtgtctgtggtagtttttccctttcacatattatagaactataagagttcacttgtatagtgcaatgtgggagataatgagtgtttatctgtgtggtgtagatcctaaaatagattctatttatcatttttctcattgatatatatttggtggcccatgacacaattaccatccttttgattttgattgataatattatcac

SEQ ID NO: 3906 - DNA, 981 bp, Glycine max
tggcacagactcgtgagtgagttattttaagctttgagtcaaatggagatattccccccacgtgcagtggccaattgttcaaggctacgcttcatctcttcatgtgatcttcagcgccaattctataataaaatcatagttctcagagcatgatgcattctttatggttttgctttcttctccttttaccaacatctagactttcaagctgactaattagtttattcacttttctccaaatcttttcatcagtttaatttgaacctcctaaggttaacactatttcaaaaggaaacatagttttaattacaagccatgaaactttgcaatctaattaccagataaaagcgtttataagattggtttagtagtgaaaggagaagaaagaaactaaaggagaggtcgtagtttgaattctcccactaccaaaaaaactaacaattagcatttgttaatcattttttttttacctggtaaaaaaaattgatatctatgtagagttgttccttcctccacttagaatgaataactcttagaaatgaagacaaatcaagcatatataaaagttatataaaaataagaccataataataatgtttgtgaaaaatcacatcaaaagagtagaaaataccactaaaggcatatgaatatgtaatggggtttccctttcccatgattagctctagatgaccaagtgatacattctactctgttgagaaaagcatgattaattattcctacatcaaatgaataatagtaaacaaatggacctaaacaaagtatgggacatttgcagtggtggaaatggatccaaggctcattgtgcttttaggaggagtgtacacagaagaagctgaagatgaagacaaggatgaaaggataatagaaggagaaggcaatggttttggtagaggagaaggcaatggttttggaggaggaggatgaggatgagcatgaggttgagaaagaccttgtatgagt

SEQ ID NO: 3907 - DNA, 1069 bp, Glycine max
gattcgccagcttgatgcctgcgacaacaggtgagttctctctcacatatccatctttgttgcttttgactgtcttttcttctccgaaatattcatgcatggctactaccgctcactgggcaaacatggtgttcgatttttttctcttgtcttttctttgatgcacaaattccgagctgttcattctgaggtttggtttggtttgtttaaaagctgacacaaatatgaagttccactagatttaagatttgtttgtatctttgttttaattttctagctatatcaaggatatatatgatattcgtggcaaatatagtagaaaactcgatccaccgtatattggtctcctatcttctccttttgtaccaaaaaaatttatgatcatgatcctaaacacaaaaagcactgccacagctttaacttttactctttaattaccttcttgctcgtgtgatgattattatcaaatatataacaggaaaaagaaaaggattaattattgatttgttattattgttgattcttaaagtttactcattcctcttgttttgactgtcttgtaaattacctccttaatctgttcgcgtaatgaagttaattattaccaagtcatatgcatggtcttgaaattttaatttttatctgtgtgaattcttatcacgtacatgtgaacattacgtaattatagcctcttttggggttggattagctggtgagatccatggaagatataggtccgaattcatgcacaaggccagtgacagagaagaaagcaagaccccaagaacaattgaattgtccaaggtgcagttcaaccaacacaaagttctgttattacaacaactacagcctcacacagccaagatacttctgcaagacttgtagaaggtattggacagaaggagggtctctgagaaacgttcccgttggaggtggctctaggaaaaacaagagggtcacctcatcaaaggttcctgacttgaatccaccaattagcctctcatcagtctcagccatttcttcccaaaaccctaaaatgcaaggagtccatgaccttaatctggctttt

SEQ ID NO: 3908 - DNA, 991 bp, Glycine max
aaatggaggatggctttgcatcaagtagctgacttgtccggctatcatttcaaagatgggtatacaatcatactaatatatattacttactggtttttattggattagggtttacatgtctattgattaaacttgtaaaatataaagagaaaataggtgcttgttaatcttgacaattaatgtacctatcaagacatggatgcaaggcttttaggttgacttcattagaactttttttgtttgttggaaacagagatgcatatgaatacaagtttattgggaatattgttgaggaggtctctaggaagattaattgtgctcctttacatgttgcggattatccagttggtctagggtcacaagtgatagaggtaatgaagcttttggatgttggatccgatgatcttgtccacatcatagggatccatggaatgggcgggttaggaaaaacaacacttgctctggcagtttataattttatagctctccattttgatgaatcctgttttcttcaaaacgtgagagaagaatcaaataaacatgggttaaaacactttcaaagcatccttctttcaaaattacttggtgagaaggacatcaccttaacaagttggcaagaaggagcttcaatgatacaacataggctccgacgaaaaaaggttctcttgattttagacgatgttgacaagcgcgagcaattagaggctattgttggaagatctgattggtttggtccgggtagcagagtcatcattaccactcgggacaaacatctgctaaaatatcatgaggttgaaagaacttatgaggtgaaggttttgaatcacaatgctgctcttcaattgcttacgtggaatgcttttaaaagagaaaaaattgatccaatttatgacgacgtcttgaatcgtgtagtaacttatgcttctggccttccattggctttggaagtcataggttccgacttgttggaaaaactgtagcagaatggaat

SEQ ID NO: 3909 - DNA, 1236 bp, Glycine max
taaatactttcattcacataatgattaggtgattgagactatacatattccaacgagtaaatttagatacacaagtcattttcaccaattgtgctctgatcatattgcctttcctctctgcatatgtttaggagaacttttcctacactttaagatacataaaaataacatataaaaacaaccttatcccactaggtaaggtcggttacatagactacacatgccataaaattaatggttctgactcctgagaaatacagacaatctatttaataagttgtcactactgatttacctcattaatcaaagttcaacactagtaaaaaaattggattttacagatcctagcatttcagttgaccatatacaccaaacaatttcaaacttacaatacttacatgaagttttatactctctacttctaaaagctatttaactaatcatatcataaactacagaatagcaatgactttaaaacagtctacttcacatctttcaatagtttctatggttaggccctcctcttttacataaacaatatggtgattggtgatcacaaagttgaggtattcaaagtatgtatgtttgattaattaatcaagctcaattgctgtaaattacacatcaattgaaagcttgtagatgtcacatcaaaaggagctgtatttccacccaccaatggtcactcaggtagtcttatgatacttgtacaaataaactcaaagtaattcatatatatatatatagctagtatttgctcatgtataatatgcactgaatttaactttctatttgatggcaatggtcattcaatctcgattgtacatgtacattatttattttcattttcaaagtcatgcttgttgtgccttcgggaaaaaaaaatccaacaccaattaagaatatcaagcacagtacctaataaaagttactatgaagaagcatagatgaaaatattgtagcaaagcatagaagaataaattaaaatgggtcagctgaaagtaagcaataaactgatagtaaagataaaatcaagaaaataaatttatcaaaggaagtaaatactgggcccaaatcaaagtaatacttctatcaatgataaaatcatcatcataccgattgtgaggccttatgcaccaaagctttggcaagtggcaatatgcaaaaccttttgacagaaaaagaatgaaaaataatcagcaagtaatcaagtatgaaatagtggttttgttgctt

SEQ ID NO: 3910 - DNA, 951 bp, Glycine max
ttggctcacagaaatcacgaatcgtttatcataagaaaatgggggcctccctcatataaatgatttagttatgtggtgctggtgtgaaattatgcaggtgtgaaattatctatttcagtagtgacatgaattcgagctcctgtttttgcttagtatataatttatggatgaaattaaatctcatttttcagtgaccactatgtactaagtagtgatggatcacaaagatctcagagccagatgaaatcaaaagtggttcaaaaacacttatatttttcatactttactttttggtgacacattttaataattgactcttttttttcctttctatatctcactattacatcacacattaagtcatctttcttctcttcctatatctttctaaaatagttattttttattgaatttatttttaaaatgtagagttaatagtttatatcaatctgatacattaagaattatttgatttaaatcaacatatttttagctaatttcttattcaataattagttttttatcctatgtttttttcgccatatggttacaaacaccttgctctttttctgcaacatgggggaaagaaccaattttataaatgaaaataatccttgtttccctattcccttttcagaatcaagatatgaattttccattttatcatttaaagattccaaacggaacatttcagcctattacttggattttcagacacataaatgtggagaaaatgtgaatgaaaggttcatgttcccaaacttctcattcagatgaacatttttttacagttgcccaagtaagataataaaaatggagagaaagaatattttcaatgtaagaaactatgatacaaaaatgtgtctagtttagtctacgcccatgtcagtttcatcttcatgggattagcacctattcaagcgagatgtcatatctaggaacacatcttct

SEQ ID NO: 3911 - DNA, 1135 bp, Glycine max
atagcaagtggtaactgtcctacgtttgcagaatgagggatatatcacattacgagatgttaaaggcagtaaactttctggaaatgttttcaatattcttttcaatctcaacaagtttattactttcgagactcgtgatccatttctcatacgtcaggtaaaaataagattaagatcctatatcactaacaattaaggcttagtaatgttagtaaattctgattacaacaagggtattttgtttaggaacgtgaggatccaaatttgacagagtgggatcgttttgcacatagagagtatattaggctttccatggaagaagatggtgaagatatgtcaaatgccagtggagatgtctgggaagaatcacttgaggcccctttctgaggttaaggtaggttcagtacatctatatattcatttaatcaatttggtttagtttacacaagaagctggatgttgatgtctcttataattacattttagatgatttttctcaaatattcatcttttgtttcgaggtttttggtataaatttctatgtagtaatccagcaccttacctgagttcattctctatagtctatacattgaaacagactcactttcttgtaaaaacttgggctaattgtgaaacactattataattataaaaattttcctgtcaacatttttgttatgaatataaaattcatgaatctgtgactaaggtaatactaataccctcaacttgcgaaggtatgactgcatacctctctttaagattttgaagaaagtagacctttgaaataatatttggtgcttgacttggtcgcaagtgttcaacccttatgaccttcatttttcatggttaaattaaatttctttgtgagataaaaagtggttcttggaattgttacactgtaaagccttatggcctcttaaatgagaagatatatgttggaaaatatagaaccattcttggacttctacctaagtttttaagcaaagttggttctcgacagtttgtttaggaagcttgctttggattgtattataaattataaatcttaatttatataacatagcaaaacttggcatatcataacagtgggtatctcatgcatttggttttaggcctaaatggatatcatcat

SEQ ID NO: 3912 - DNA, 1381 bp, Glycine max
  misc_feature (19)..(19): n is a, c, g, or t
atgatgatatccatttagngcctaaaaccaaatgcatgatatgccaagttttgttatgttatctataactattaataaaagtaattatcccatttcatgtacacatttgctttttctaatttacccttcaattacttttaaaaacctctcacaatcacaagtaattacagtctaaaatagcttttaaacatggcagttattacaactacataaaaaaaaaaacagttaaggcacaatgcaaagagtgcctgtttttcaactagtataaattaagatttataatttaatccaaagcaagcttcccaaacaaactttcgaatcaactttgcttaaactcttgggtagaagtccaagaatggttctatatttttccaacatttatctcatcatttaagaggccataaggctttaccgtgtaacaatgccaagaaccactttttatctcaaagaaatttaatttaattattatatattataaatgaaggtcaaaaggttgaacacttgcaaccaagtcagaagcaccaatattatttcgcactttcataaaatcttaaggtattatataggcggaggtatgcagtcataccttcacaagttgagggtattaccttggttacagagattcatgaatgttacattcataacataaatgttgacaggaaaatttttataattataataacgagtgtttcacaattagcctaagttttacaataaagtgagtctatttcaatgtatagagtatagactatagagaatgaactcaggtaaggtgctggattactaaatagaaatttattccaaaaacctcagaacaaaagatgaatttttgagaaaaatcaagtttataatgtaattataagagacatcgacatccagatgcttgtgtaaactaaaccacattgattaaatcaatatacatatatatatatatatatatatatatatatatatactgaacctaccttaattaacctcagaaaggggcctcaagtgattcttcccagacatctccactggcatttgacatatcttcaccatcttcttccatggaaagcctaatatactctctatgtgcaaaacgatcccactctgtcaaatttggatcctcacgttcctaaacaaaatacccatgtcgtaatcagaacttgctaagattactaagccttaattgttagtgatataggatctcaatcttatttttacctgacgtatgagaaatggatcacgagtctcgaaagcaataaacttgttgagattgaaaagaatattaaaacatttccagaaagtttgctgcctttaacatctcgtattgtgatatatcacacattctgcaaacgtaggacagttaccacttgctatactgcaggcatgccaagct

SEQ ID NO: 3913 - DNA, 931 bp, Glycine max
tgttctagtgacacttctgtttctcatgcctcttttctactatacaccaaatgttgtcttagcggccattatcatcactgctgtgattggtctaatagattatcaatctgcatataaattgtggaaggttgacaaacttgatttcttggcctgtttgtgctccttttttggggttctgttcatttcagtgcctttaggtcttggtatagcggtaagctgttaattcattaattttttttcttcctgttatttacaaagctaaaatataatagcatgataatgcaattgttttgccataaaaataacagctgacttggtcaaaatcttcaggttatcatatcagtcctcaagatcctgcttcatgtcactcgaccaaacactttggttttggggaatataccaggaacacaaatattccacaacataaaccaatacaaaaaagctttaagagttccttcatttctcattttggctgttgagtctccaatctattttgctaactcaacttatcttcaagaaaggtaggtcaatgctatttcagtaatgtagctcagtatggtgcttttgaatccatgattccatatgattgagagcttctcctgcaacaggatactgagatgggttcgagaagaggaagagcatataaaagctaataatggagctccattgaagtgcataattttagacatgacaggtacatactattttcgttggacctacaacattagttatctaaaattttgacttaataatattcttttttgtcagctgtcacagccacagacacaagtgggcttgacactttatgtgaacttagaaagatgctggagaagagatcacttgaggtacagacactgattgagatgtcaaaatgcctaaaacactaccctacccattattttgttttctaacctctacatttattatggct

SEQ ID NO: 3914 - DNA, 1306 bp, Glycine max
atgatacgcgcagcttgcatgcctgcgggaatgttggccaaaggtatcaagaaacaactaggactcgtccatttatgtctccgactaagactttagtaagaagttaatgaaaggaagaagtattattctcttactgattgaggtaaagtttgtataaagaatcatagcgaagaaatccatctgtagaaattcttatgtactactagtggtggatccaaaaaacttctgtagggacaaagaaatagtctataatattttcaaagacaaaaaatattataagtttttataaaatacacaatctcataataaaaaaaccaaaacacttaaagcttttacaaatttaaaagagtaaagtgagtaaaattagtatcaatttattttctcttatatcttttataatttttcacatccttttattaaaaaaaagtattttaggggacaacacctattttttatgggatcaaaagcaataatcgtttattaaagtaaaaaaaaatctggtgaaggggcattagattggaaagtggacacggataattaccataccacttgggagtacatttacaatttgcaatggttgagttaggcaatgttttactcatgctccgactggacaggaaccatgtactattacttgttctgttatgtttatgtgattctcttatttggggacttatccttttgtgctagtgaagttagcagtggtgatgatgggaactctctcagcatctcccctctggaggaagatcaggcgggggattccctccatgcatgatttgctggactagtgtggtttgttttgtatattttggttgaggtagttagtttgttagatgtccttgtgtgatggcatggaagcccctatcattgtttaagatgcttcatgccaataattggtttggaattggtttgtacttccttggaaactgctagtagtattatctgtctattactgctgatagaatcaattctatgtttacattgtatgcagaatgatgtagtgggccagattatacaatatatgtaggatgcttgttgaagcacccattgatgggatatatatatatgatggaattgttgatgtacttgtgaaatccaatgatgaatagacatgtgtacatgcatgtgttgttgacccaataatatctgaaaaagatatcagtagatggatatcatgataattatgttgagaatagcatgagaatgtgaatattaaaacagttatggatacaatgtaagacattgagggttctttcatcaatgatgttgacaggccaatttgtctccctaagacattttttggttt

SEQ ID NO: 3915 - DNA, 1131 bp, Glycine max
aaagaaaacacgattctagaatccaatcaatattcagactccaataatgctacttccaaatcgtctttgtaactgatcaacttctagtaaaacctattacaggcttcagggattatacagggtcttgtcctttttcgacatagtaaattgatgtatcaatcttgtcatagatttgaaatcattcattttcttttattagtgggaattgaatacatgtaataaaacatttacaacaaatcacatatcatattcaaccgtgtttcacttccttggtaagtcattcatcttatattccattcagcatttttcttgttaaatttcttttttcatcattctcatcagttatcagcattaacttggaaagaaaatcaactttttctattgtaaaacaattgtcataagaagcattcttaatgtttcagaccacacaataccttttaaaatttaaaaacattttggaagatattaaacctcaaacttcttcaatgatgccatttagaaaaacactcgggtggctttttcttgacatatatcaagtgatcgtttgactgtaatctctactacctctcttttagtcacttgaactacaataataatagcttttgtaaaatttagaatttggtagaaactaggtagaatttccaacatcgtcgtgattacgtacaagacatgcatgtcaaagcaaactagcaatttgattattttaacggtcacctattcatcacattgaagatcgttcatttatcagaataggagttggtagtcaacaacacatatagattgattttcagggaatttcagcaacgcagaattaaaatggaataatcttcggagtgcatttgacataataataccaaatgtaacatcagcaaaggtttggccgggtgaagaagacttttgttgcttcttgcatgtttctctagacttttcttgtatttcttgtgtcacaaacaattgtttcctccacaaaaatgatgaccacaacagaggcacatgtgtgcttgtggggggatccaacagtgtataaatagttacagattataacaaaaaattaggactacaaacaagcatgttcaagcatacagtagctttatccatgttgtcaaaagaagaaccacctccgccgtgtct

SEQ ID NO: 3916 - DNA, 1131 bp, Glycine max
  misc_feature (1109)..(1109): n is a, c, g, or t
aaccactggtctagttgaatagttttcaagatctgtttctattgctgctggacctactgtggaatcatcaaccttgttcacattaaaaatccggcatgaatatacgcggataatgttgtacacgaaagtccaaatgtagatgtgtcctacctggtaaaccaaaattagaaattggaaaatctcaattcaaagctgtcaagttttctgtatgatgaacctagtcaatttactaatgtgctaggttagattgtcttactgccatggacaaagaggcatatgccatccctttcttgttacaaacatccactgctccaaaaggactactgctttctttacagactgctggaactatgataagaggcaaattgcctagatttcctgttttcatcaaatctaaaatagtgagaaaataaattatccaagtgtcaagagggtgtgtgagacttcatgggtagcttagttggtaatacacgctgagtttgtaggaaaggatctagattcgatctccacaaaatacactcttggggaggggtgaggaaccttaagtatgactaaatcccaaatcaagtgattaccttcttgttaataaaaaaaagagaatatgtgatatcccttgtgttgtgactatgatatattctaaaaaaaattaggctaaaatatctttttcatcctcataaatatggaaatgttcagaatacatccctgcaactccattgtttgtgtccttacaaaattgaaatttgttatttttttggctcagaataagattcagacatccgaacttacgtgtatgattttttacattaattatatgcacaaccgatgtaaaaatgtcacatttacatcaattatatatataatcgatataaaaaatcatcattgtaagtttggatttacctaaacttatgtccagaccaaaaaaatacatttaattttgtgagaatgaaaaacgtattaaaaattttgtagggatgaatttcgaacatttgtatatttatgaggacgaaaaacatattttattcaaataattattaactaaaccttggcttgatctaatttattaaaataacaatttgaaatctttaagtgaattacctgcaggtcgactntagagaagaccccgtgttccga

SEQ ID NO: 3917 - DNA, 1222 bp, Glycine max
cctttgtggcctttgtgtgctatgtaataattataaatttaactacaaataagagtctctgttgcggagtcaagacacaggaattcatgattgggtttcttattttgtttgtgtcttatctgttgctacctttccttttactctgacaacaccccaaaaccctacacaagtgtttgtacaaactacaaagactgataggattattgtagacaagacattggcaaagatggctactacaaccaaaagcaggatgactatgatggaaaaggatggacataacttgaattgcagcacctaagctcagttttgggctatgggccaagcccaaatcggtagagagaatgactaggatgttgaaaaaggaaactattttctatacacaatggaagcactcaatcccaactcactaatgaaagggaatgcggtaatgaaaaaggagaatagtgtctatcctaaaagaagcacatgcttcaaagggaaccgagcctttaagatcatattactatacatttggtttggccactatagaagacaagaagtagagggtcacttcagcaatgaatgaatgttacttctggagatgaggtcgggaaataatgcaatgctcgtgatcctttcttgagttaaaagtaccaggcccaatttattaaagagggaggcaaaacttttggggttgaagtcatggtgacctgtaaggagaaaaccacttcacttggctaaggctcaatagcatgggtgaggttggagatggttcaaatgacaaccatcacttagtcatcgggactctcataccaagtcaagaacacaagaaacaacaatcccaaaaagaaaactggttttatattctctgacaaaatggcaacagaacgaagtaagaatgaaagaaagggcctatagttttcagggaaatgtaactcctttctgtggtgggccatgggatcaagtattgcttatggacaaacaatctcaatgataatgcaaaaataatgtgtatatatgcatacatgatagaaaatgattgaaagcaataaataataccgggtatcaacttcagatagtagacaaatttaaagaaaaatctctaatcaagaccaacaaaacttacatttcagaaaaatttggggtgatcaagtgcatatggtttactgaaaaagcaccaattgcagacttgcaatgtaaaaataacttttgacattgaagcttgtcattttaagcaaggtat

SEQ ID NO: 3918 - DNA, 1105 bp, Glycine max
ttgcatcgcctgtcagatacaaagtgcaaaggacatggaaaagatagccactgcaaagttcggaagaaaaagaaaatgcttcgggctggtatgtgtgtatcatatgtagtaactctgttaaaagtttcttctgctatatgccaacaaatatcagttcggatcacttgagatattggtgtgcaatatttggtgtgaccataaatctttattattatatgaaaaggggattttaagagaacttctattatgagagaatgagatgggttaagattaaatctcaatgttatgtgacttttctatatgatcatgcaagcattaaaattctaaacatcatgtatagttgtatgttacagatttctttgttatcttcttgtgtaaacactcctctgatcacatgatacattccttgtatcaaatactgacaagggattcaaactctacaaataactgagcactcctatgtttcacttttttctctcatacaagatttctttatcaaatgcaattttcttgtagttgtaactaaccactgtgtttgtgctcttttccccctaaactcttctgttatcaacagtggttgcttccttaggaggaatagtctctattgtaatagttattggattcattttctacaagaagcataatcaagcaaaggaggccaaaataaaaaagaggaaagaaatctcaagtgccaaagccagtgctttcatcaagaatcttcactggcagagagataaaaaaagcaactaacgatttctcccaagaaaacctcattggctctggtggcttcggtgaagtcttcaagggaacattcgatgatggaaccgtcttcgccatcaagcgtgccaagcttggaagcaccaaaggcattgatcaaatgcaaaacgaggtccaaattctctgccaagtaaaccacagaagcctagtgagactccttggctgttgcttggaacttgaacaccctttgctaatatacgagtatatttcaaatgggacccttttcaattaccttcatcgccactcttctggctcgagggaacccctcaaatggcaccaaagactcaaaattgcacaccagacagctgaagggctttgtatctgcatt

SEQ ID NO: 3919 - DNA, 1011 bp, Glycine max
tctagagtcgacctgcagaataagtttcccataagattagatccacccccaaggaagacactagatacatcaccaactgcctcaaagaaatagacgaacacaaacaataccacttctgcaagcctttcttctaaagacacagcatttgcatcaacacacatgaatatctttcgataagcagttctcatgctcttgatctgaaacattacccgagcaaattgtttagttgtgatgaaatataaattgaggacaactaaatttgaaaattgtgagcataaacctctgcaatgctgaatccacatcgagtaaggcccactacatttagaccacgaagctcagctctttctccggctaccatcatgtactttgggacatcttgtgaaaccttcatttatgtaagaacatgacaatgtagttgcgcacctgagtagatgtaaatcaatttggcattgtaaaagtatttgttttaacaagttcttcaataagggcaatttgatgtaatacattccaaagatagcagcccttatgtgctagaatccatttttaaataaactttttgttgaaatcatctcagtgaaaaataaatgttacattgattgctgatgccaaagttgagaacagatccactattacataagtactgttatttacagtaattgatactgttggtcccgctcagaaatttaagtccctatcaaatttgcccaaatctaaaggatatgaagtgatcttaattgtgttggacagatttttaggttgcatattcttcacatactcctcaccattcacatccattataagtttagtacgacctactagaaaacttctgctgagtgctgactgcctatgattttgacagttgcatgtttccacaattgcataacaatcatttcccttgttatcaaacagattgattcaagaccatgaagataaaaagataaacctaccacagaaccaccaccaagaaaagagaaagagccaagatgacagaattgatgaacaacagtcgca

SEQ ID NO: 3920 - DNA, 825 bp, Glycine max
tgtgactgttgttcaccaattctgtcatcttggctctttctcttttcttggtggtggttccctggtaggtttatcttttttatcttcatggtcttgaatcaatctgttttgtaacaagggaaatgattgttatgcaattatgtaagtatgctactgtacactgtacaaaatctaaggcagtcggcagtcagcactcagcagaagtttaagtagtatctagttatctagtagttggtactaaacttataatggctgtgaatggtgaggagtatgtgagtaatgtgtaacctaaaagtctgtccaccacaattaagatcacttcatatcctttagacttgggaaaatttgatagggacttaaatttctgagcgggaccaacagtatcaattactgtaaacaacagtacttctgtaatagtggatctgttctcaacttcggcattcagtaacttttatttatgactgagatgatttcaacaaaagtttatttaaaaatggattctggcacataggggcagccatctttggaatgtattacatcaaattgcccttattgaagaacttgttaagacaaatacttttacaatgccaaattgatttacaactactcaggtgtgcaactacattttcatgttcttacacaaatgaaggtttcacaagatgtcccaaagtacatgatggcagccggagaaagagctgagcttcgtggtctaaatttagtcggccttactcgatgtggatttcagcgttgcagaggtttatgctcacaattttcaaatttaggtgtcctcaatttatatttcatcacaactaaccaatttgcttg

SEQ ID NO: 3921 - DNA, 1272 bp, Glycine max
atgtagatgctaattaattagagtatatatttataactagacaccatccccaatattcaaatcaattttaatcatcaattttgaagagatatcacatgtcaaacaaaaatgtgaatcagaaaaaagaaagtcagtgttgttacccttgtcaactatatgggcacagatgacaggtgagaagaaatttaaataacaagcttgtcggtagtgatatggccaaaggatcatgatagtgcatgttgggtttgtggatctggttcaacctaatgtacccatgcccggtggcttaaatagggaagatcccatgtctgatgcatgtgttaatgtcaaaagttttccctatgatagcagcttaagcttttggcatagtagtaactagtaagcgctcttagtcatatgattgggtatctgaactgatacatatttgaatttcaggttcgatatgtttccaattatctcaaggctcaaaaacaaacctcctctaagagagagaaaattatatggtcaaagggtcatgagagtgcatgttggctctgcgggttggttcaatccagtgacccatgcccaatggcttaaatatggaaggacagtgtctaagcagagtgttttatcttaaagtgttgtgtctaagctaacagcataagcttttgacagaatgataggtgcccttgcctccttggtcatatcagataggattttaaaaaataatcagcctcacagttaacaccagccatattaagcatgaggatgtgtgcacagagatgctatcatataaaaatgacaaaataaaaagaggaaacaaattttacatatatcattgtgaaaaggacatgaaaagaaaattaacctagaaaacatcaatatacaaacatactgatcatatgaaaatattgggaaaaaaacaatcaaactcttagcaatgatgctatgaagaatgaggacaagccaagttttttataagcctacctggggtgttggagatgggggtgcggcatctacaggagacagagtcatagctttattggccaacttgcataaagccacagctccatcaagctgttgcttggggttataagagccaagaagccccataagcaactccaaacctgcatggacagatgcttagattcaaatagaaaagaaaaagcaataaatcacctagaaaaacgattttaaaagcaaaaaacaacatacatcaaacttaagcaggagatttgattaagacacataccattataatcaataaatatttttcttgatcatctgcaggca

SEQ ID NO: 3922 - DNA, 1000 bp, Glycine max
tttccagaacccagtgagcaaccaattgttggagttcttttgcaaccttcttctttcgggaacaggcaagatataagtagttcatacagcatttcagccttacttctctgtctggcacatttataaattggaatttttacttaacagctacttattgatttggcaaaacaaagcctattgaaaaataggattttgtaaaattagagtttaacttcctaattgaccattcatattttttatttttccactgtctgtcatttcaaataatttctcggattttcaaaattacaaccgacatttgatgaacttgcagagccaacttccaaagaagtttgtgtaatttgccatggctgtatatattcttagagacagcactgcatgatttcatgagtggcctgtattttctatcatatttgtatctaaatcttgactctgtctgaagtgatgggtgaacatattccaagacagcaaatgtttccatcattattcaacacagacatgactctttctagatgagtaggggttgttagcttgaaggcttgtgaagaaatcttgacaattatactttatcgttttttttatctgccatcttattagcatattccatatacttgtctgcgatctgatattacatagttgagtaaaaaaagtatactcattatgttcaattttgcagactcttaattgcgtttgaggatggactgcttattctttgggatgtttctgaatctagaattgtgtttcttggtggtggaaaagatctccaattgaaggatgaagatggtaactcttcttccgaaacgggcaccaatcctccagctgatattgtagaacaaaatctaggtgacaaagagataactgctctttgctgggcatcttctactgggtccattcttgccgtgggatacttagatggagatatccttctctggaacttgtcatcagcaacagcttctaaaggccaacaaacttctaaaaatgttgttaagctacaactttc

SEQ ID NO: 3923 - DNA, 1287 bp, Glycine max
ttccttgggaaccttaaacctgtctaacacaagtccaaacaaagaggaattttgtttcaaggtaagttcagtggataatgactctagactcctgagaattcaaaatatattcactctgtgtggcaaccaaagagagctctcccagcacattggaaccccagtacaacctacaaaaaagaggtctgatgaaacttttgaggtttctcctgccaagacaagtgacaaggattccgttttcaaaatttccaacaaggagaactttgaaccacataatgttctaggaaattagctctagttgtttgtttgtattgaaaaaatgaaaagacgtgtactacttgtcatgtttccttctggaaatactgtgttttttgggtgttcttttgagtatgtgtacatagttttcatcggatttgtagttgtgtactactttgtgttctataaatatatttatgtctgcccttctttgttctataagctatttaaactaattttgctcaaatcactttcatcgatagctgtattatatatttctgtgtcggcctttctttgtgttatttagtgtgtgatcagaacatttataaaaagattttaaatttaattgatttttaaatcatttatgtttgaatgtttttattttgaaaataaatttatagagtaaatgagtcattaattagagagataaatgccatattagaaagttactagatattttctttaatacttgtataaaaatcttaaaggtcatatgttcttgaaaaagaatatagaatttggtatcaatttttcaactcaaataaatacatagttgtcactagtcaaaccaaggttttgaaacaattaattttactcgataggaaaccaaacacactatttaactactaagcatctaaaattttataaaatcaaatttaaccacataaaaaatcaattctcattattccaaccccaaatcaaacatgttgtttaaactccattttttcaccaataaaaaatatacgcagtttcaaaaaagaagaaaaaaaattgcacaaatcactttgatcaataggtgcattttataccaattcgttacatattatgtaacaattgaatccagaaggatccaaaatagccgatgacactattacaaaaaaaaaaaggaactgaatctggttggtaaatgggatggaagtcagagcagaagacgaagcgagattggtttataatacatagtagagtacttaataggtaattagtaatggaagaataattaatttcttgcccctgaaatctctctctaaactgaat

SEQ ID NO: 3924 - DNA, 944 bp, Glycine max
atggaaacaaggaaaatcctactaatgaagctgaacaaaaagagcctgagaataaggtgattgttctttgtttatttctagtgttctgattttgtctggttctgaaaatgttaacattaccagtagtcaagcagaagattttttatttgtcacttataactagctcattatgaaattgtaattgtgcatatgatcacagatgtaaagtcacttacatttacaggaatattctggagtctgttgaatgaatgataatccggtaatgtttagcttgccctttctactatgagttgtcactcattgctttggatctttattttttattgtttttgtactacttttatgttgtgcacttttgaaatttaactgtgaatttgagaactcctgtgattattcaatcgttagtcacagaagaaattctcagttggcttaatttccatttccatcattaaaatttgacaattttccttctcaatattgggtgtatttatacttcttgcatttcttaacatgccttttatttctattgttgtatgtagaatttcttagttaatgcttttagtttgtttaaatttgatagcttaattaatagcatttctttcctggtagataggagatgactctcgaggaatatgaaaaagtactagaagagagaaggaaggctttccacgcacttaagactgaggagagaaaggtagatactaaagttttcgaatccttgcagcatctctcgaacaagaaagacaatgatgacatctttattaagctggttagccttacgactctatgttttcagtctagtttagttttacttattaaatttgttgtactaatacttaatgtgagcctcacttggattttttctttgtagggaggtgataaggacaagcgcagagagacacttacaaggaggataaattaaaaaatctgtgactgcaggcatg

SEQ ID NO: 3925 - DNA, 974 bp, Glycine max
tgttgacattgttggaatcctgaggaaggcaaagtcattcaacatcctaatccgcctcatgaaaaccacccaattgatcaaccaactcaatgctcagcttctaactactaaatcaggcggcataacaattctttcacccgatgacagtgctttctcagaactcaaagtaggcttcctcaactctctctctgatggccaaaagctagaactcttgcaattccacgttctttcagactatgtctctagctccaactttgacactctgacgaaccctgtgagaacacttgcaggggctaaacctggaaaggtggaactgaatgtgataagttacggagggagtgtgaacatctcgacgggtgaggttaacaccaccatcactggcattatatataccgataaacatcttgctatatataaggtgggtaaggtgcttcttcctatggacttctttgctgttgctaaggcacctgcaaaagcaccctctttggctccagaaccttcaagtgatgcggcaaaggcacctaaagctgataaggatgagtcatcatcttcagatgcatcgcaggttaatcccactgaacagaactctggcatcgagaagatcagtgtgtacggaatgtgggtgtcccttgtttttggactggttctcctgattgcattttcatagtaaaccaaaataagttttgatgaatttaccaacgttcaagccagtagttaagttaccatattgttcatgttcaagatgtgttgttatgtgtaatgtgattgagagaaaggagtgaatactgtagtggtgaatttatcagactgggttgggggaatcttgtatttgactgattgttgtgcattcctttataaattgaagtgtttatgacttatggtttcgtcaataatttttgcaagctttatgtctttcgaagaagaaattaatatggcccgtctttactaatttgaacctccattttgttatgcat

SEQ ID NO: 3926 - DNA, 1210 bp, Glycine max
tgaaaaacgtaaatagttgttggggacctttacattcacaagaaatcaatggacaacggtaatgaaataaatacgaaaaatactctaataggtagtaggtactatcttaaactttcaaagtgacacaaataaaaaaaataaagctacataacaaataaaaagaaacaaatgatgtccatcaggttatcaggaattgattgagttacatagttatggaagatttagagtagtctttaaaaaatttatatggtaaataaaataaaataaaaagcatttcatctactcccattgttttattagggatcaacacccaacccaatatataacctaagtctgtccttagtcttgttattagtggagatgaattaaatccaaaaaaaaatatttatccacgctatacaagacattgtacacacttttttttggatatatgtacaagacatatgtagtcgaccccacctagtggaataaggcgttgttgttgttgtatgtacacactttctttctactactttatcttcttaattttgaaaaaaacaaagactttattcaactataagataaaattgactataccatattagatacgtttcaattattaaaaaaaattgactatactttatcttctcaattaatatactatctatttttgctgagaaaaaaaatattagatacatttcaattattaaaatttgaaatgctaatgtatatgactatttacctacatagaccaatgaataatttatgtaaaaaatagtacacaattttacaataggaaccgagctctaattcattgatataaaatcatgtatcattcttaaatgtaaagagcacgttaccaacatccattatatagaagaggacaaaaattgagaaaaaataaaaataaaaaggggcaaccatctcaaaaaagctcatgcaatttatcggttcataatatgttccaaacttcgactagggatcattaccaaatcttaccatcaactaaactcatctttagataccttccaacaaaagaggactcactctccaagcaatttatacagttaaaacattcgctctaacatcccccatagttaaatcagaacaggctatgcagtgtctggcctaatacgtctcctccccaacagcattggtttcttccatgctgttgttatcatgtgagtttacagcatccacaactacatcatgatttgggctacttacttcc

SEQ ID NO: 3927 - DNA, 1230 bp, Glycine max
atggcaaactagtcagatatgtctaaacaaattaatatactggcatttttctgataacacaatgcattaaagactagaatctataactaataaaaatatttgttccaacaataattcatatctgagttataaccaaggtgaatgcattgttaagtagtcatctcacaaaaactagggaggcaagacttatttgcttcaaatgagatcctgccaacactaagccataggaataggaccgtcctagaacaataaagaagctaatctaaaccaaaatacacacagctttggacacacattatccttgacatgagccctactattcatgaagtccaatttcaaaagaaactgttaaggaattgtaactatattttaatttactgcatttaggaattagagataaaaggtggatatgggccattctctctctctctctctcttctctctcgagggagtgagcaattggcacttctgatcttacctataagttgtagctccagtctgatgaagaaaccacatggatgtgaagctgattgctagacccaaaaatccactaaaggtcatcaccaaccaaaagctaggcaatctcagaagtggcctgtaaattaaaatacataatattatataatattagaaaaagaatgacatggtgtgagtagcttcttatatctgtcatcaacataaccacaacaaattatgacataaaaacacatttcttgagattccagatctgtgtttgtataaagaaaaacagaaggcaaaagataaaattgggatgttctcttcatgatacattttaggacaaaacttacatacagttccttagatgatgtatgtattgttttcccatcagaattggagttttacctctgtaatttgcataatcctttaatgcaaacctttttttattcaaattatcaaggtgacactccaattttgatagaacaatacaaacaactatcgaatattatcaaagttgtgttacattttaacctatgagaacacataatcttgtagaaaatgaagtatgccaagcacataatattgagtccaatcacaaaaatataggaaaaaactcacgtgcttaagagataatccatctcattgaaaacaataatcaggaaaattcccaaaggcacagaaagggtgttgttcaacaagaccattgaaaactcatttaaatttccagatttagtaacttgctttgctgtatccatgaccctttggagcatc

SEQ ID NO: 3928 - DNA, 1132 bp, Glycine max
tgcatcaagccatcatccaccttctgctggatgctttaaagcctgcatctctttatttaaatgacctgcttgtctcagtatgaattgacctacagcttgcatagcagcttatcttgtaccattgatttatatatatttttttctatctttccattcaagaggaggtggacagcatgcacacatttgcatggatgttcaggtaaagggcttaccttagaatgactatttttgtattttcagagacttcacaaatcttttaaagaaaatcagtatccagatagaaccacaaaagaaagcttggcacaagaacttggacttacttatcagcaggtcatatcttttagtttttcactttcagtgaacacattttatttttctcgtgactttctgaatttaccattctttttcactcaggttgccaaatggtttggcaatacacgttggagcttccggcattcatcacaaatggaaaccaattcaggtagaaatgcttcacagcaagttactgatggcagagctgaaaatgagggggagaaggaatgtgaattaatatctctggagttcagtggagaaaaatcaaaaaccccaaactctagaaaaaggaagcatttgtcagaacccctatctgaagcacagctggatatcaatggctcagcagcaagttcaccaaatgttcatctaacgcaaataggcaataaaatgaagacaaggaaaaggaaatgatgcttagttgagaagtcgggtttaaccttttcctaaggcttcaaattgcagtatccatccttttgtgagattgagatcccatgagatgatcagctcagatctcgatggatttgtttccatttaggaaggtaatcttgtgtgccattgtattttttaaaaatagctttccaggtattgatctctggtgagttgttttgcctctcttgcaaacactaaaaatagttcagttattagtttttaaatttttattttttttatttacagaaatctcattccttgttccaaatgatgttttttccctccttttaaggggtttactaacattacaaaaaagaaaagaaaaaaaacgatgaaaataggggaacaatttatttttgtacctcaggattcaatgccattactgtgttaa

SEQ ID NO: 3929 - DNA, 1015 bp, Glycine max
acggctttctaactaatcctttgtccatataaaacatctgcatgttagttattcctcatgcagtcacatatactacttctgtattggattttgagcatgtcgtgtcacagaagacttacaaacaaaggatttactttagacctatttcatgacttgtttaaaaacctatcattgggcttcaactattagatgcactggaacaagtttaaaaatatttaatttgataaaagtgagctactcacctagtttcctagatttgtctataaataaaatgataaacaaggaaaaatgaagggaaagaaaacgcttgaatttgttctcgcacccttgtctcctaagttgccaacctttctttttgggctttgactggaacagttcatgcctgaatttgttcctggaggacttaccaaaaatgggttttatgcttccattatcttgtatatggaaatcatatatgccgagttacatgaacaaaagactagttttaggttatgcatttcataatttaatcctgcaccttattattttgtgatatttgtgagataaatgaaccaacaacatcaagttgtgttcatattgtgctatgagtggtaagtccagtaatgctgcaaaatttatttccctttctaggtcattagttttataaagaagtggatgtgtgatttttgaactgaaatttgaattttggtcctgtaagtgttagttccacttttattgataattgatatcagataccaatcatatgtgacctgtttacaggttaaggaagaagttgaagccgccctaaagaggcatttaaccagcatgaaacagtaagaaataatctcctgctgattatttaaattccagtgccttggacatggtattgagcgaagggaatggattgggaaaacaagttttagctgaatgatttgaaattgtttagcttgactctagttgtttctgatgcatccttttcacttgttttcaggacctgtggaaaggagtttcatactactgaattaagaaatttgca

SEQ ID NO: 3930 - DNA, 1126 bp, Glycine max
taactgactggtgtatgtccattgcattgcctaatagcaggacattgttcaggtgtctcacaattaaaagactattggatatttagattaaacaaattaccaaacatcataaaagctttcacactccagtgatgagccaccaaaaaggaagtaatacaagacatgttgtttatagagaataatggttacgaatcttagtatcacaactgctcaagaaaatggtgaaacacgttaaagaaggatccacagctccacacttatatgttaatacatcaatccattgcatcacgtcacataatttacctattttaatgggattgctatagaagtcattcttttaagcatttaggtggatatcatacagtgtacatttagtatgtcggttttaacttggcattattgagtaaattaatatctataaaataaaagaaaagggggaaaatcatttctatataaaatcttaccagatgccgttcagttttacagtatggttgtacagctggaagaccaagaggagtggtccaacaaacaggcatgttttcagaaacaattacctataaaatttttaagatgccaccattcaggaatagaaagaaagcttgcaaacatgcaggcacacacatatacaacagtgttaaaaccaataggattttagtatcatttgaagtccaacatgctatcagaccaaacctttgcacaatcaccaagccaacccataatgacacgtgcagcaccaaaaatttctccaagggcagttaatgttacctatagaatgataagagtataaaatataagacaagaaagcagatttattgtataagcatgcctttgcatgttgattcacatgtatttccactcatattacggggatagatttaatcaaaccaaatccattaagattgtactaaatatacaacaccgtcaaataaccaacttgatctaaaaacctgatctaggtttgatcgggtctaaaaaggaatattttctttaatataagtattccagcaggtaataatctcctgctgatgcaatgataagaaatgcacatcaagtcagacattgcagtttctaaccgctaatataggttcgtacaacatggctgaaacttactttagcagcatagcaa

SEQ ID NO: 3931 - DNA, 1180 bp, Glycine max
ttgctatgctgctaaagtaagtttcagccatgttataggaacctatattagctgttagaaactgcaatggctgacttgatgtgtatttctcatcattgcatcagcaggatattattacctgctggaatacttatattacagaagatattcttttttagatacgatcaaacctagataaagtttttagatcaagttggttatttcacagtattgtatatttagtactatctgagtgtccggatcttaatgggcttggtttgattaaatatatccataatatatgagtggaaatacatgtgaaccaacatgcaaagacatgcttatacaataaatctgctttcttgtcttatattttatactcttatcattctataggtgacattaactgcgcttggagaaatttttggtgctgcacgtgtcattatgggttggcttggtgattgtgcaaaggtttggtctcatagcatgttggacttcaaatgatactaaaatcctattggttttggcactgttgtatgtgtgcttgcatgtttgcaagctttctttctattcctgaatggtgggatcttaaacttttaataggtaattgcttttgaaaaccagcctgttcgttggaccactcctcttggccttccagttgtacaaccatactgtaaaactgaacggcatctggtaagtttttatatacaaataatgttcccccttttgttttattttatagatattaatattaatttactgaacagtgacaagttaaaaccaacatactaaatgtacaatgtatgatatccacctaaatggttaaaagaatgacttctgtaacaatcccagttgcataggtaacttatgtgacatgatgcaacggattgatgtattaacagattagtgtggagctgtggaccctactttaacgtgttgctaccatatggctgtaattgttggtgtttcaccattttcttgagctgttgtgatactaagattcggaaccattattctctataaacaacatgttttgtattacttcctttttggtggctcgtcactggagtgtgaaagcttttatgatgtttggtgatttatttaatccaatagtctcttcattgtgagacacctgaacaatgtcctgctattaggcaatgcaatggacatacaccagttagttacctgcaggcatgcaagc

SEQ ID NO: 3932 - DNA, 1039 bp, Glycine max
agcttgcatgcctgcagctttggtactataaaacgaagcataagttgttcccaacttgcagaatcaaatacagtcttccaaggagacaatatagcataagcagaaccatcacttgggtgccaggcaccaagaacagtactcaatttaaaacgaatcacctggtaaataccctccaacttgtgccccagcaaaggtagccatggatgcacccaagtgtgaataggaatggtctcacggtgtggttcccaagtatctacagcactagataattttggcatgactatattgtctaatatggtagcaaggactgaagaaggaagtaacttttcccacgattccagaaaccataacattggctcaggatcccgtgcctgccaggtattaataccagatattctgacagctggcaatacaacctctgaaaccaattgagtataaggtgatgatacatcccatatatcaaaataatcttctccttcaagcaatgccttccactgtgacaccaactccaacccatgagaaggatttcgaagaggatcccatccttggaacactctgataagtagaggtagagcatatgagcaagcaatgcatgacaagttacacaacttgtagttatcagcagatcttttgcgcaagtccctaaagtattgagccagagaatccaatgttaatgttcccaaagtgttttcttctccaacacggtccaacacactcattatttcctccatattatccagctgcttcttttgaaatgctgcttcagtttctaacttctctttttcgtttttcaagctaagtgctgtctccctctctctcctcaaatctcgatcgatctcttggatgtcagcctcagccaaccgaactattaacgctacattatgctgaagttctggcattgggacatcattttcttttgctttctcctcagcatttaaatcagacaaatttgttaatactcgaacctgtggccccctcatatcataaaccttttgaacaacctccaactcttgttcttgcttgctcgccaacaactcct

SEQ ID NO: 3933 - DNA, 1193 bp, Glycine max
  misc_feature (904)..(905): n is a, c, g, or t
attctgccactctttggcaagcatgaggtggcacgtttcaagaaaacagaggcacctctagcaaacagtggcctctcacttgatctacagaaacttaggtgtcgtgtaaattactaggcacttaaattcactccgcaactcgagaatttgggtcaaaaattgatttggatacttcttgagaatggaccttttgtggcattgcatctgacatatgagataaatatgctggctttctcaggttgtacgcatggttgaactgatgaagaagctgaggagctcaagcggatgaggtattttatggttatgctttgcggttcatatacttatggataggtttttctgagagataggtgcttcttttctgacagttgctggggaagacgcagatcactataattgttttctctatcatagctaaattgccattgattctaaatagttaattgtacctcctgttctatcatagagtcctggatgccagttgcttgtgctggtggaggcaccctctagttggaggagagcagtggatctgtagttcatgagttacatgatatgttggattttctgtattttggcaattacacattagtagttaccttcacttcataaacaataaatatttctgtgatcaaagttatttataacgagccgacataagatggatctatctcataaaattttgatcttgcttgtgtaattcaggtatgcattcccttcctggagagaaaaggagatagtgtccgaagaaaggagatcactgggtctctctcctttgacaccagaggagtctgccttaattctgcaagccttgggttttgacagggagacaccgatatatatttcagctggtgaaatttatggtggtgaacgtctaagagctgcatttccaagaattgtgagttcnncaccacccccccccccttcccccatacttctatatttgatataatcaaggtagttagaatgaacctactcaggatcaggaagggagctaaagattctaaatcatgggaaagttaactgatcgtaagaacctactaaattcataatatatgcatgtgtacaaaataacaaaaaaaaaaaaaaacttcaaatcactgcaaaacacttgcttaaacttaaattgataaatcataatacataaggtcatactaactcaaactagtaacagaataacgtctccaaatacaaaa

SEQ ID NO: 3934 - DNA, 1254 bp, Glycine max
atagggaaggcaaaattcactgttaaggcagataccaaaagagatttccccagtattttttgacctagactgcaaataggaaaactattttccatctacatgtcaatgacaatcctagattaacacttaaactcggaattctcaaaataattatcatattctttcaattaaattaacaagatgcgaaaagagaaaaattgttgatggtgccataagcataatagagcatgcggaagatgtgtcatggtgaaggtactctccaaataattgtcctagactcctagtgtttaaaaaaaaaaaatcattcttggacctctagagatcgtcaacatacacaaaggcacatttcgtaataaagggcaatgctaactgctatgtgtcaactctaagaccaataggcataactaagaagccaagttacaaggtttcatttcaatttgagcagagcagaacagtgtgacaccgtacagatcaagaggtaactgactattaaaatgtagagaagagtataactttttcggattgaaagaaaatgaaaattttagtgatagatttaatgatgtacaaaatatctgcttgcttagttcatttgtaaaatatacaaataaaatactagatgatacctggatagatgtgagtatagcagccacatcatatataggactccactgattttgtagtatatccaaacaaatacttccatcagcataaactacacgaagttgaaaaaatgaattagagctacacagctaaatttattgatactccaacgtaaagattttccacctaatacttactatttggatgaaacatgcgagacacaaatcgcacagttggtggtttatttggataatcctcagtaaactggagagtcaacttgaacgtgcctgaataactcaaaaatatgacacacagttatgtaacacacaagatggaaaaagaacctgacacttgacaaacatttcaaaattgttttctagtaagatcttcggtaaagaaatccactcacctccatcccatggagtatcatcaggactgcaatccaaagcagtcaagaaaccaaaaatcacttatccatcagtaattaaacaacataagaaattaaaaaatagtgaccaattgactataaattaaaacaacattggacctatatcgaatttgaattcaactcacccaaatatgacagcattccacagcattatgttgttatcctggggggcaccgctgatccctgcaggcatgcaagctggcgaa

SEQ ID NO: 3935 - DNA, 971 bp, Glycine max
acaggtttgtctggtactcccgtggatgttggcagaaagccctcactttgtattgctgtcataggagccaccggtgagctggcaaagaggaagattttccctgctttgtttgccctctactacagtggctttcttcccgaggtacaacatcttttattgcattatcgcacctgtttttcaacttaaaagttctcgtacatgcatttcaaaagcctcagttcatatcttgagactcaaaattcttagaatttcgatttgggcataactcatcccgatagctcataaagtgaggattacccgccacttatatacactattttgaccgtattattagttagaggatctttggcaaaccttcctcatgccaaagactgaaaatcttgaatgtgaagtttgcaggattggacatatgcgagtggtccaataacgagtagctcgataggcttaataacaacactagcataagttctaataccatattagattttgggtttggatttaactcaatcccaaaagttagttcataaaattttactagccttccactcatatacactatttttgccatttcatttgctgctagtcaatgttggatcttcaacacaaattcaaatataataaaattgcattggattcaatcatccacctaacgagcaacaaaaacaacagcacaccattgtctgtctgaattgaatcagcctagagtctaacagaatcctccttctttagctgggctcaaatctggctatgagaccataagcaagttcatcatccatctaatgagccttttatgtaaattaatttgtagctttgttctttttccacctcgaattcctttgttgtgaatacataatctgttggattttggcatgagattttattccaatatttttttactatgataaagaaattggaacatatcaagagtacttgtttctagtgaatcttatcttttccaattgttacattgc

SEQ ID NO: 3936 - DNA, 1276 bp, Glycine max
atatatgtaaaagatcattgagaatataagagcccaaagatattgcaaattgaatgtgtgaaaggacagtcggtccagaaaatatgaatcacatgaattaaactctaccaaaattgccaaggtcttcttcagatagcctcattttcactatttatttattttgagcttgttgtgggtattaaatatagcttctcacgtatcaggaaacaacaaaaatatagcttgagacctgctttagctatttttatattatcgagtaagatgttttagaataaattatcaaaagccatcacgaaagtgtttgtttaaacttcaaagagcacttagaaaatgggtacaaccgtacaagtaatcagcaactcattttgcactgggcctgtatttacggccagtttattaatatatttccttttttctttgttgcccttcagttgcagattttggcaaatccaattttcgtatactgttccagaagcttaaattaaatattatcatgcatgtcaatgttaaacaaagcatttactgttactttgaaagagcagatccccacatttagaagttctatcaatttattactgaaaaaagagttaccaaagttgcaacaccatgaccggccagtgctccagctatgactccaaggggagaagaagctgctgctagggctgaaaagtaggggaaaaataattcaggatctttgaagatgagttcagtgcatgacaagaagcaagataacatgtcttggtatttgaaaaaaaaatgaaaattcaacaagaaaattatataaactgaaattgtactgatccaaatcaattgacactcaactctttacaggacaagcagataagttatcttcaagatttgtcaatatcaatatttatttatttatacattggtttgtttaatagggatttcagagcaagatttctgtcaatatcataaaagaatgatactaatgagaagaaaggtgttataattataagtggtccatatataacagttagtttttgtgaaccaaaatttctaactttagaactcaccaattgtggagaaaaatgacttatcgccccattcagcaacaaaaaccaagagaaaagtactggcaactgtgctggcagctgatagtatcccagccccatttccagaaaaatcggaaactgctagctctgcctggttaagaacggaaacattaaattgtaggaaccatataaaatattgtgaaccagttcaaagtgaagaataaaaaaactgagcttaaaccaatattcatgtaggcaca

SEQ ID NO: 3937 - DNA, 1062 bp, Glycine max
tgctggtacacacctatattaagagaggaagcatggatgttagaaagatgataattagcctcgtgaaaggcaaccaaaccctgaaattattcactacttgatatagaaaaaacatacataagtggaaacgagtaatatcacaccaattccaacaggatggtttgtttattaccaaagggtaaaaaccttggtatcctattactgtatgaaaatggttgcttcattttgaagaaacagtccatggtgtaaacatgcatgtgaaaacatagttgtcaatcctggatgaccccaaaaaacaatatagtgggaaaacagatacaagaattgccattaatagtaaaaaatgacatagtccagagtccagacactatttatccaaagcataatgtaatgacagaagccaagaagtataagggaacaataagggagagaaacaaaggtgatggaaattaatagaaaaaacaaaatggaataataagaacataatcatgcaatcaaatttagtgagctgtgagcctgtgacctgtgaagtgcagtacatgacagcaaaaaaaaaaggagagaaatggaaacactgatgtgtgcatgaatcagtcctacgacagacaagggcacaaagaaagagttttgttgaaacccaaccaacaaacaggcattagtgggtcaccagaaaacacagggcttaacaaaggaaaaacaatagcgaatagatggtcaaacaagtggacagattggaagtgcaaatgttttccttttagtttgatgaagtttccataatggtcttcaaataaataacttggccagataagagtcttaaattgaccaacactgcaatctgatggctttactggagactggaagcaaaaatggaaacagtaaacaaacataccttgagttaattcaacagaaggtctccgttcctttacccactgataactgtgtacaagtctccatcctttggacttcatcaagtatgcaatcacaatagctggagacctgccataggatacatgttattcagagaaaattataacatttttatattgcattcctcatttgaaa

SEQ ID NO: 3938 - DNA, 1185 bp, Glycine max
tcgcatgtcctgcagtcacctattgagaatatatcctctactgtaggaacacgaagccactcatcaatgccaatcctgtgcataaggaactttaagaatttgcttcatggaaaaacagtaatttatagttatagttaaaattaccacgcaataaaggaaacatgagagcagaagtcagggcacatcaactacgtcaaatacaaggaaacctaatacagttgacacgggtggacaaatgactaggaagtaaaatgtaactacatatacgtatggatgaaggccgattggtaccaacgaccaatgttagccttaacatacttacaccacaatataactacctactgaatccaaccatgaatttataggttttctacatgatgattttcaaggcaaagttttgaagattttaaaatgagtagatagtgaaattatttatattttcttgcatttatgagatttttttagcttgacatacccgaaataaactttcaaatccaaccttgaaattaatttttttgtgaaaagttattcattgacttaagatttattttaatccatgccaaactcagtcttcttgttcataaaatacatgcatatagtgtgtaacatctttggacaaactgaaacctgctttccctgataagacagatcaaaatactatatctattaaaaaatcagctgccaatttgtaaatttgaaacagctgccagtagaaagaaaatgagtgcaactatgttgagtagcaagaacaaccttccaccaggagctttaggaagatccaaagagcgaataatagctgatggaccaactccagtagaccataccagcaacccatatggaacctcagtaccatcatttaggataatcttcttctcttcaacatctttcacaatgccacggacaagtcgaactcctgactgatagaaacttcaatatgaggagatataaactaatactgaaaaacttaaagagctagcctatcaataagttttcatcataattattgcactacaatgaagagtcccatcaattatatgaatgatcccaattatctctgctagaaacattgtatcgtgatatttttctctttttgataattatttaataccatagtaatagattacatttctttaaacagaaaactgggtttagtttctcttttgtttctattcagaagtttgagat

SEQ ID NO: 3939 - DNA, 1244 bp, Glycine max
tacgccagcttgcatgcctgcagtctcctgcttattaagaccctgtaactccccatacctgaagaaatagaataaacaaggataattgtatccttctaaaattcatagaacatatcctatgaacaagaaacagagagattaatagctacatacattcgttcattcaactgccaagctgtaataactggaatagattgcttggtggttttttcactgtaaacttgagtccaagctgttgcccgttcactctcattatggatgataataggaacctatagagtaaagattttgttaaaaactccaggttctaaaaacatttgacaggtatgcaaaacaccaatatttattggcttttttaatggagagcagcatacattctaaatagttctggaaaataagtatttttaaagattagagacctctaatctgtagtacagataatggtttccctacaagtaggccacaagcaatggttgtttaaaaaattattgaatatattgattaaacctataccaactatttaggtcaaagaaaacaagtttgtcccccccgccccccaaattacttcaaatagaggaaaaatgaacaaaatacaaatagaagcaccaaatgactaaagccaccagtacatgcagaaaacttttttcaatcaagtaactagcaaactgaattataagtggcatgactaccttctcctggtggtgctgagtcattgcaagcatagccgtcatctgtgctcgaatcagtgcggacgtaaagatcatatcaaccggtatatagctaatcctcttaccagcttcaatagcttcctctacacctctcttggtcaaaggcacatcgcaacatcccgtgaacaagttcttctcattccacaaagactccccatgacgaatcaatatcaaagtactctcagtctcggctaaaaaaacaaacactcaagtttattcagtgatcaaaacacatagtttacaattttgtataacaagaatcacatattattattagctgtagctaaagcaaagttagttaaattagttagtctagaaaaagaaatgcttactagatgagtcgtgagaaatggagagtgatgaagggtgagaaacggaagcatgcaatattttatggtggcgagagttacacgcgaatcgcattgagaagaaccttgcgagatttctagaagaagatctcggcgcgccccaaccgtgaagtcccgtaggttggtatttgaaagtagcagacatggt

SEQ ID NO: 3940 - DNA, 1026 bp, Glycine max
tgaggaaatccattgcagaggttgtccaagaacttgttatgggtcctaagcaaaccccaaatataaggagagcacttcttcaggatattggtaaactgtgctgcttttttggtgtgagacagagtaatgactctcttttacctatccttcctgctttcttaaatgatcgggatgagcaattaaggacagtattctacgaaaagatagtttatgtctgcttttttgtgggccaaagaagtgttgaggaatatttattaccttatattgagcaagctttaagtgacgtgacagaagctgtcattgttaaagctgtagaatgtatgactatgctatgcaaaagcgggttcttcaggaagaggatattgcttcaaatgatagagcgcgcctttcctttattgtgttatcctagtgaatgggtgcggagatcggttgtctcttttattgctgctagcagtgagaacttgggtgcagtagattcttatgttttcctcgctcctgttatacggcctttcctccgcaggcaacctgtgtctcttgcttcagagaaggctctgctttcatgtttaaaacctcctgtctcaagacaggttttttatgaagtcttggagaactccaggagttctgacatgttagaaagacagagaaaaatatggtatagttcttcccaatctaaactatgggaaatggatttactgaaaaaaggaattgatgagttggattcattaaagaactggactgacaagcaacaaggtcatggggttcaacaaacagttggcactgccttccaacagccagggataactgattgtgacaaagctgaggcaaaattgagagatatgggggcctttatgcataatgatagcaataatgtaggacatcgtgatacccaatgctcagagaagttacagttttcaggatttatgtcaccacattttagtggtatgaacagtttgacgtatgaaaagccatcagaaggcatacctttgtactccttcagtgtggacaggcgaggaatgggaatccctt

SEQ ID NO: 3941 - DNA, 1177 bp, Glycine max
  misc_feature (1172)..(1172): n is a, c, g, or t
agcttgcatgcctgcagtcatgcaagagttggtcagtacagaagcctagtttgaagatcgactaacaagcaaatgatgacaactgaaaggcaaggaagcaacaatcatgtaaataggaatcaggactttatgattatcagttctggtggcccagatcatgcattacacggatgttatttgaagtagatgctagcatcttgaacttctagatcagctcatagcctacaaaatgttttattgattgatataatgatatgcaattactttaggtgaaaacatcaaaacagacatgttgataacaagcagggccacaaagccttcaaaagtatgatccccttcttctgcaaactaaaatgcttcctcatgtgaaaaacaagcagcatgacatacagagtagaaagccaacacaaaatgtgtatatcatttcttctaaagaaaagataaacccaggctctaactttatattttcaaatacaaaacattatgctcacataaaagttaagagtgatacagaccatattaagataatttaactgagtaacgatgcaggaaatagcgaccatggtaaaaatccatgtctggaactgaacaaactggtcggcaccctcgatcgtaagtcttatagcaatgccaattgcttttatgctcatgacctgagaaacaagatattctatcagaagtgcgaaacaaaagatgacctctctggtattgagttttgtcaacttaagtacttcaaagataaattgggtagaaagaggagtcacttacagtcaaggatccaattatggagcatattccaatataaactaaaatattagtctggccatggcgaggagcacaatacaaaatcaaaaagaacactacagcgatcgccgaggcagtgtacgacaggaatgctggatgtccaaacagaaagcagaagcagcaggtatacataacaaaacaaaattcagctatgatattaatagttacattacagccacaatccggattttaatcgctgatactataaaacctgagcaagcaacagcataccaggttgaagtgccaactgccatatttcttctacagaactaagagacttctcttgaggcgcatggagcacaatcacagtggaacccacaatgcacagaagacaccccagcatgcccattttctgcaggcatgcaagnctggc

SEQ ID NO: 3942 - DNA, 832 bp, Glycine max
aaaatgggcatgctggggtgtcttctgtgcattgtggggtccactgtgattgtgctccatgcacctcaagagaagcctcttagttctgtagaagaaatttggcagttagcacttcaaccgggtatgctgttgcttgaggttttattgtttgtatctgcaatcaaaatgcgaattttgttttgttatgcacgcctgatgtttctgcttcctgttttggcatccagcattcatgttgtacactgcctcgaccatcgctgtagctttctttttgatattgtattgtgctcctcgctttggccagactaatattttagtttatattggaatatgctccataattggatccttgactgtaagtggctcctctttctacccaattcatctttggagtacttatagttgactaaactcaataccagaggtcatcttttgttttgcacttctgatagaatatcttgtttcccaggtcatgagcataaaagccattggcattgctataagacttacaattgagggtgccgatcagtttgttcagtttcagacatggatttttacgatggttgctatttcctgcatcattacgcagttaaattatcttaatatggtctgtatcactcttaacttttatgtgagcataatgttttgtatttgaaaaaaaagaaattagagcctgggcttatcttttctttagaagaaatgatatacatattctgtgttggctttctactctgtatgtcatcctgcttgtttttcgtgtgaggaagcattttagtttgcagaagaaggggatcatacttttggaaggctttgggccctgcttgttataacatgt

SEQ ID NO: 3943 - DNA, 1254 bp, Glycine max
aatgatttgaaggaactctggtctctcttaaatttacttcttcctgaagtttttgataataagaaagccttcaatgattggttctcgaaaccatttcaaaaggaaggtcccactcaaaatgtagaggatgattggcttgagacagagaagaaagttattattatccatcgacttcatcagattcttgagcctttcatgctcaggcgtcgtgttgaagatgttgaaggctcacttcctccaaaggtgggattatagccctctaacttgaccatttactcatactcctgtttctcaatgcttatattaatgcttcattgcaggtcagcatagttctgaaatgtaaaatgtcagctgtccagagtgccatttatgactgggtcaaatcaactggcacccttcgtcttgatcctgaggatgagaaacgcaagcttcataggaatccagcataccagatgaagcaatataaaactttaaacaacagatgcatggagctgcgtaagacttgcaatcatccattgcttaattatccattcttcagtgacctatctaaggaattcattgtaaaatcatgtggaaaattgtggatcctggataggatcctcataaaacttcaaagaactggacatcgagttctacttttcagtaccatgacaaaacttctagacatcttagaagaatatctacagtggcgaagacttgtatacagaagaattgatgggacaactagtttggaagaccgtgaatcagcgatagtggacttcaacagccctgattcagattgtttcattttcctgctcagtattcgagctgctggacgaggcctcaaccttcagtctgctgacacggttgtcatttatgatcctgatccaaaccctaagaatgaggagcaggctgtggccagagctcatcgtattggacagacaagagaagtcaaagttatatacatggaagctgttgttgacaaaatcgctagtcatcagaaggaggatgaactgagaagtggaggcactgttgatatggaggatgaacttgcaggtaaggatcgctacatggggtccattgagagcctcataaggaacaatattcaacaatataagatagatatggctgacgaggttattaatgctggacggtttgatcaaagaacaacacatgaagagaggcgtttgactttggagacattattacatgatgaagaaaggtatcaagaaactgtccatgatgttccctcactgcaggcatgcaagctggcgt

SEQ ID NO: 3944 - DNA, 1158 bp, Glycine max
  misc_feature (1092)..(1092): n is a, c, g, or t
gcttgcatgcctgcagacgatgagaggctctgtgttttcttaattgagaaggcattgagtaagcttccaactggaaaagaacaaatacttacaatagttgatctcagaggtttcagtaccgaaaatgctgatcttaaattcttgacattcttggtagtattttttatcatctgccaaatatcattttgataagaagtctgcattgtcatcactagaaagaagttgtacaaagagcatcacaaaaactaatgttttattttttgcagttcgatatattctattattactatcccaagcgattggctcaagtcctatttgtagatgcaccttttgtttttaagccaatttggcagctagtcaagcccatgttaaaatcatatgcttctctggtaagtgttgctcatttttaaatgtgcatttattaatatgagaaaaaaaaaagttattttttctctttataagggagtgctgagaacttgatatgccttgaattttgtaaatggggcacctcaaattataacgcaaccaaatttgttgaactcaaaattgaggggaaaaagggagggactgtggtgaaggtggagggcttgggctgataggggtttgtggtggacctgacccatttttgtgtatttccttggaatgtgaactggtttattgggttctgagttataaaaataggagtgttgttcattgtaattggatctaacatcacaaaaataggaggtatttgcctttagaagggtatctctactggtggtagctgaccatgcattttcaacttctgaatttgaggttgagggttcatgtcttagacccttcccattaggctcaggtatttccacgtcaattatcatcagggggctagggacaatggtcccatccatgcaatccctcatttctttggggtggcgagcatgtaactgacattacattgtatgtggttacgtcaaatagcagaatgttttacatttggcttatgcgatattggacgtaagattgttggatcatatttcgaagttgaacaaaaccataatagattaatttcagcactattttgtgttagatattaggtctctatgctgcccattnttcactttcttctaattctttcttctccccccctcctcgattttattttacaggtgagattttgct

SEQ ID NO: 3945 - DNA, 986 bp, Glycine max
agtactttctggaatctcgaaaggtgcagccatctcatccttttgagtctaaaagttggaattctgtcatgtcagtcaaaactggcatcttctccccctgaatgcctactttgggatagcaagactgatgctcgaaaaatgtcacatccattgtatgatagaattttctggttgtgggagagtagcaattataccccttttggtgaggtgagtatcttaggaatatgcttttgatggacttgggatcaagtttactatggtgcgggtctaggttgtgaacaaaagctaaacagccaaacactttcaagggaattgaggtgaggattttgttggttgggtaggtggtctgaaggactgcatgaggggtgttgaaattaaggacactagaaggcattttgtttatgagataggttgcggacaatacagcttcttcccaaaattgttttggtacatttgtggccaacatcagtgatcttgtcacttccagtaggtgtctattttttctctctgccaaaccattctgttgtggagtgtctacacatgaactctgatgcacaattccatttttctgtaggtaggaattcagcatggaattataatattcatgaccgttatttgttctcagcaccttaatgttggtttggaattgtgtttgcaccattgcatgaaaaatttcaaatattcgtgctacttctgacttttccttaagaaacactcgtgtgactcttgtgtggtcatcaatgaacgtcacaaaccatctagagccggtaatattgctggctcttggtggtccccatacatcactatggattagcgagaatggttgggaaggtttgtaaggttgtggggggtaagtgctcctggtacgcttggataattgacaagtttcacaatgaaaatttcttagtcttttattgaataatgatgggaacatttttttcaaatacataaaatttgggtagcctaatctatagtgccacaacatt

SEQ ID NO: 3946 - DNA, 980 bp, Glycine max
tctgcatcagccatgtgatcactataattaggataggtttactacatgaaaatgtagggtttgatttttgtaccgaaaaatgttaacatttgatttgataaaccaataataatgagccgtatgtgatggactgatggcagagccaaagccaggagcatgtcatgcctcgttggttttgtttttgtttttccagttttcttcgcactctcgctgcaaagtaaataatatttttttttacttctgtactttttaatctataatttatgaatcaacaatttttaattatattttccttttcatatataataacatggaaaatgttacgtatgtgtgcttttgaattgaagaggcaattcgtatactatatatatatatatatatatatatatatatatatatatatatatatataacttggatcatctcttcagacacaatcgatctttttaatgaaagaatggacttgaagttacttttgtatataatatatcataatcattattattaaagatataaagattgatttagttgtaaattgtgaaagggagggagacatgaataagttgtggatgattggaatacctccactaataaaaaataaaaactgacaattagatttattaataaaaaaaattcataatcataatttatgacaatgagttatataagattcaccactaattaatcataagagacttaagtttattgtgcatttataactttattgttatagcgggacttccttataacaaaacacgaaagggtaagcccattttatataagtccactgaatctaagtatatcaacttagttatagttatttcttacataaattttatatatatatatataacttctctagtctgactttacatattcacacactgacattgtaacatttgatgtgatttgtgtgtcctatgtctggcactctagcgaaatattcaggtccttgaaaggaactccaaatgtgctataca

SEQ ID NO: 3947 - DNA, 1000 bp, Glycine max
tgttataactgagttagggttcggtgatccacttgctaaccatgttcctcaaacagattctatgtcatgtatcgatgatctatggtacacaaagagactttcaagccatggtgatgaaaatgttgatgaactaatgatgaacggacaagtgagaaatgtgtttgttgacccgagagatttttaggtatataattaatgttcaaaggtttgcggtttgcctatgaaaaaaaaaacttcaagatgcatgggttctatgttgacctaaattggcttgtatattatctatatcagatggttaattaaatctgttgattttaatcagcaaacagttacctacatttagttagttatgcacgatgttaatatcagtaggttttctatgatatatatatatatatatacacactctttcaccacattgtattgaaacactccctgatattgggttgttgaaagaaaacaccaaaacatgttaaatgttgctaggtctctcaggtttcaatcccaagttcctattctttttttgtaatttgatgtcctacaagcagttaacatcattaatctcctgacaaaaaaaactgattataacagatgagatgcatatctgataatctcagcataaattaacgctagctttatgtgtatccttgacacggagttatatatctatgcctttttcttccacccatacatcccaaaattaatatctgctgttctgaagagaagggtatctgctgctaattgttttttttttcctgttcgttggagttgtgggaattggaagttaatggcttaatgcaataaccactcacttacaattcgggagaggaaagtggctttaacatggttctttgatctgtgaagttttgcaatacaatgttaatttggttaggtaaatatataaatatgtaaaggggctgttgatatatacaaaatgtagcaaaatgtctatagccaagtttggttacatatgaatgtcaaatctgcaggcatgcaagct

SEQ ID NO: 3948 - DNA, 1043 bp, Glycine max
tgattcgccagcttgctgcctgaggttgcttcatgaaagcgcaccaactccttgtctctttatcctgtctatctatcgctctgttcttttgtcttcaactttatctaagaaacaggtaacacgtgttcaagcatagacttggtaatgtggactatgtaacttcgttactactagctagctgttgtcttgttaatcaagatgttatgtgtaacacggggattccagtgtgacatttgcgttcaagttttattttaggaaattaaaatcaataaaaacatgtataattggttgatacttgatatgcaatacctttttttcctcaaatctgaacttaactttttattttaaaatcatagaagcagataaaatgaaaaataagacatgtaatcagaaattaactttttattttaaattatgtcaggaaaaataatgtaactttttgtgcaggtagagcaatgcaattgaactgcaaatccattgacgactgtctcacgtttctgagaatgaattttagttactgtacagttttagtaaaactacaaagtcccagacgaaaccattttaagaggtttatattatactggggatataaataaataaaaagctaggttataactaaaatactcatggaatatgttatatatgcaaaaaaaacagcaacataactggcaaatcattgcaaaacatgtaaagaaaatcgagaatcagtattgacattgatggaaagttacagagaaggttgatgaaaggaacagaatcattatttcacactataataatatcacgttttcaactgagtggtgaaagtaggaatacaataatacttagtttcacacaatatgatacacatgtgtttgagtaaaattttccttcaacctcgaagcagtacctttttgtcacataacactcaagctattactccatttcatccaccgttgaatcatatggcttacattacatcactctttattcaacaaatgttacaattttttaatgactacgcagatttaattcaaggataaaatacaaggaaccccctccat

SEQ ID NO: 3949 - DNA, 812 bp, Glycine max
atgactgaaatcagaaaccgtgttacagtatctctttaatattcaccttttgcttataaaataaaatataaaaaaaaccgtgattagaaattttcaaacttaaacaaaagcattagacgaagacttattgcatgaataaaagaaggataagagagaaaagtattaaaaatataaacaactttgaagacaaaatattgaagttgaagttttctgaaataagaacaattttaaattcgcttagagaatcttcttagtaatcttccttcttactattagacaaagaaagtattgaatgtttctaaagtcttcaagacattaaatgcatttactttttatttatttaattccttattcaaattaaaaaacattcgaaagatctgtagaaatatttgaattcaagaatataatattgatcaatggcataaattgaaaacaaataaataagaataatgttatatatatatatatatatatatatatatatatatatatatatatatatatatatattctcctacatatgccttaatgtttgaaaatatagtataaaaaattcaataaatatcatacagaaaaataaaaaaatattgtaggaggatttatattttttcaataaacaattatttaactttgcgattagttcagtaaaaaaaaaaaacctttgtgattggtcaataaaaattaacaataatgcaactgctcctgatgtcacctacaaattctcctgatttctccattgctaattaaaagtttatttattttttattcacttatccaactttttgccttcttttcatcatgttttgatatgc

SEQ ID NO: 3950 - DNA, 1282 bp, Glycine max
aagaaacttctttctcattttgaccaacctcatcaccttcaagattacaagaatctggagacagctcctcagacatatttgattgattgatgtactcacctggcattatgaatgagctatcctgactatctatattttcattgtttgtctttgcaattatattgctggcacttttttgtggacctgactcctccagatgaaactctgcactgtgacctatttcagatgttacctgttcaactccattggtctggaccccatccataaggcaattaatatcagaaaatccagagacagtgttcaatccttgttgatcaatttcctgagaagagatatgcaacatgtcattctgttgaaaactagccttcccatgatcattagacaaagacccgttaaattggaaactcttccaggaataattgtcgaggcccgtttttgcacctgactccactttagcttttgatttcctaccaattttatttttcaagtgtttcttatcttcagtttttgatacaccatttacactaacagaattacattctttgataactgaaggatccttttctagagtagaagcaaattgtgatgaagttgtgtttactttcttcaagtcaccactaccatcatcagaactgttcttctgaaccttttgccatacagaatgactattttccttcccttttcgaccatgcaaaattccagcacccccaaatttgtttagatctgaactcttcgacattgttctcttctgcttaactctcttatcattactgatgcaattttgaccaccatgccaaatcccctcattatgttcacagttattgtgaataccattcgttaagttttgaccaagagaatatccatctcctgaatctgaagtgattgtgcaatttgccttgttggacggctttcctgtatcattagcatttgtactttcatcacttctgaaaccacctgaaactgaatccagcaccaaagagtcatgtacatcattaaaacagcatggctccatgtgttggatgtcctttattcctctatcaatgacttcaaaatcagggccctcatcttggagctgattcttgggttcaaatgtggcacattctccggcagaactttgaacaataggttcagtagcttttgacatgccctgattaagataagagttgcaactattaggtgcttccataatattgttgttgcaattcctttcacaatcagattttattaacctatcatcagaagttgaaaattctcccacatcctccttatccacatcattgct

SEQ ID NO: 3951 - DNA, 1273 bp, Glycine max
ggtgaggtgacatcttattgtatcaatcacttattaatattattaacagtaattaacaatcatatcatccgcaataccttttttttacttgttatttacaggaaactctctggctgcatatcccttataagactttttttgttttacctgtacagatagaatacataatgaaacaaagcatgcctaaagatggaaaattgcttgcaattggacactccatgggtggtatcctgctttactccatgctgtcacggtttggtaagttttatgcttttggtagtatcgattgatcattagccattttgcctttatttgttattatattcttattcttgtctgtttgacatttgtcattgcctaaactacaatgtccaatcattgtttaatggggtggggggaggtataatatttggatttggaaattcctgttgtagcctgatattatattatcatgatgttcatctatggaaggtagctttcttctattctgctgttgaattggccaaatattaggttaatcattagatatcaagactttgaatcaatcttcagtcaatgtttttactttgggaggaaaattctatgcaacaacttgtctatgaaaatcattagcctactatctattttttcaattttgattgagtcactgacaataatccatatcaatttcttagcccaacttgaatattcctcattcgctattaacttacttgaaacagaatcaactataaatcttgacaaatcacaataagatcaaacttagaactttatgaaatttcatcgttatattgattgaatatatgatcaagtataatcctattaaagatagattacatattaaagtctttatacatgattagtcttctgaataagaggtgacaaaaaagtcaaacaaatgaatttatgtttttttttataaatgaaagtaggattcaatctgtattatatctgctggctgatggattcttacatagaatgatcttactcccaaaatcacttctacccttctattttgccataacacattttttgtgttgcaactttggtagctacttaaaaaaactaatacacagtaacacatgttactagtaagcatagaagtgtaaatctaggacaagcagggcatcacctctttacatatactgacacatctgtattttcatctgcttagacatgtataaaataaatatgtaagttatttacttaatatttgttttaatttcatgtaaggttttgaaggaaaagaatccaacttggctgacaggcaatgcaa

SEQ ID NO: 3952 - DNA, 1267 bp, Glycine max
gtccaggtcctgacaactcacctttagaagtacaaataaggacacaggtgctaagttatttcacatgtgttgcagaggttacttgtttatattttagttcttgatattttcatttattattttgcttgatagaggatgcatgagtgtgctgaacaaggacttgctgcacattggctttacaaggaaactggcaatccttttttatccatagacagcatggatgaacctgaaactgaagcatcctcctatttctccaaagatctagaggaaggaaattcttcagatattttattaagtaaatataagtcattgaaggctggacatccagtcctcagagtagaaggaagtcacttacttgctgcaattatcatcaggtacataacactttcatttctaatggatattatgttataaagctatccatactgattgtcacccatgttcattatcttttcagtgtagaaaatgatgaaagagaattgctagttgctgtgagctttgggctagcagcttctgaagcagtagctgacagaagatctttccagattaagcgatgggaagcttatgcacgactgtacaaaaaggtttgctgcttaaattaacacatattaatattgatgtgacttgagtatagatggctcgtgatgaatggtttatggaaagggcatggattgactaataattacacttaatgagaagtaaatgtcttgatggatctctatatgcggtagttaagcttaccaactagcttcctacgtgctgtattgctctctccgtgtccagatcctgctgttgtgtcatcttttcttttgtattgtattttaatttttaaattacctagtaggttgcttactgttgacctgtttcaggtgtctgatgaatggtggtttgaaccggggcatggggattggtttacgtgtctagagaagtacacactgtgtcgagatggtatgtatcataaggtatgtttttctaagcagttgagaatataaaattacacactacactatagttttcattatttttgtttatcaacaacgtagacagcctctttgcatatgcaagggtaaggctgcgtacaacatccctcccccataccttcgcatagcgaagagcctctgggcaatggggtacgaagtttttatcaacaacgtagacacaatgcatacatacactgaaaaaatttcatttcttttagatgtgctaatttatcctttgcgcactaactgtattctagttcttagtgatcagcatgtgtggaaatgat

SEQ ID NO: 3953 - DNA, 1267 bp, Glycine max; identical to SEQ ID NO: 3952

SEQ ID NO: 3954 - DNA, 892 bp, Glycine max
cttgcatgcctgcagcaaggttccccaagttcaacttgtttatggatgctggtagcatttaaaagagatccataaattccagcatggggctccattggcatgctctgaatcaatttcacagcttcttctaatttaccaactcgacctagcatgtcaatcatacatgcatagtggtctacatcagggactttgattgattcaaaaactttccaaccctcttccaataatcctgcatgactgcatgcagttaacacaccgatatatgttatgcggtctggtccaataccatcttctttcatttttgacattagcttgatgctttcagttccatgcccatgggctgctagcccggaaatcaatgtgttataggaaactaaatctttggttgccatttcttgaaatgttattctagcatcttccatactcccacatctcaagtacatgaaaatcaaagaattgtatcctgagatgctaagcttgatgtgattttcatggaggatgctgacagcccaattgcctaaacctagtcttccaaggtgcccacatgcagaaaaaacactcaccatagtcacctcatctggttttgaatctttactagagatcatttccttgaacagctggattgcctttaatgactcgccattttgagcatagccagcaatcattgaattccaggagacagtattcctttctggcatcttattaaaaaggtctcttgccaaagataaatcacctactctagcataagcagaaatcatggcattccatgtgacagaattcttatacacacccaattgctcaaaaatcttctgagctacctcaaggtttccgcactttgcatgcatatcaagcagagctgtcttgacaaaataattgaaacgaaagtcattcg

SEQ ID NO: 3955 - DNA, 1033 bp, Glycine max
ataggcttgttttacagtgctgatgataccttgggctccagagttcattctgagcctgttaagggttattcgcctcttgcagatccttgtctgagtaaaaaacgagatacaacaccattgggcattaataatggtgttcctgatgtaagcagtgaaagaccagcttctaaaagcagttatgacggtctaccaatttcggcggcagactcaaacattctgtttgtgggtggacttccaaaagactgcactagaagggaagttgggcgtatcctttgtagcttaactagcttatatgtctgcttgtatgtgtttgcgtgttgccttttgttcctggtgtggcaataatggattggaagaaagtgttttgaaattaaagctgtattggatttactaaatgagatcctctttagttagtcactctttattttttagttcaactaaaactttgcatggacaataagttgtcttttaagtttaacagcatatggaaattaaatcacttggttcctgaaataactttgatggtatgtttgggagtgggattttgggggatgagaagggaggttaaaaattaaaaatttgcccttctttcccttatcctccaaaacacattccgaaacatacattgtattttgttgttatgttgatatgaagtcttgacctttacccatagatcttttccgtccctttattggctataaggatatcagagttgttcacaaggagcctagacgtgtaagtgtgttaattaagaatttcgtgttgactattttagaaaattccagtaatgtacaatctatcaatgttattatagtttgtctaggaaggaaaagaactacatatgatttcatgattatcatgtgtttttaaggaatatgatattacttctcacttgttgcagcattcctctagttagtaaatagtaatacattagctttgacagccaaaaatattttgtgtagagtgttaatctacattatttcatttttcttcatttattatgaataaccagtagtttttaaatgactgagat

SEQ ID NO: 3956 - DNA, 1018 bp, Glycine max
tcttgtaaatcaacctctgaatttacaaagatttcttattggatagtttttacttaataattcgattgtaactttcaaactgtacttacaagataaaggaatctgattcagtcgactgagcaaaatgcattaatttttgtaaatttcttagtacatgttttcgattcttacagattaaaaaatctgtacttacaagacgaagccatactgaatactatttgttcacttaaattgtttgataaaagaaaaacgagagcttggtgccaatcacattataaactgaaacttatgtatgcttttatatctcaagatgatcacaattcagataccggagttgaaaagaatataacctgttaaagaattttcatctgaattacatacattcctcatgaatacattgtaataatggaactataatctgtctcaggacatccgaaaggaccatgtggacacatgatcatctccaccaaaaatgtccttccatatacaatgctataattgactttaatgtagataaaaaaataaaaataaaagaataattgtacaactaggaaaagtttagagtgcattttatcttcatgtttccttgtgtccccaactcacatatctcaaattttctggtgcagaagatcatatatccatgccaggaatgtcctctacagaatcacgagtagtagcatgcatagagccttagacataacaagtggaagatgtgtaaccatggaataacaaatccataagagtcacataaaggcaggggctaattaatcaattaatttgttaaaccagttttgttctgcacaagttgttcaacatctccaagctccatttctttcccttgaatctcatactcattctgaaacatcatctctatctgctccaacgacttccctttagtttcaggaactaatgtgacaacaaaggcaatggcaagagcagaaatagcagcaaacacaaagaacgttccagcaacactaatagcctcagacacagaaagaaaagacaggccacaaggcca

SEQ ID NO: 3957 - DNA, 1183 bp, Glycine max
atgtagcctttgtcaccatcatcaattcctccctgtggttcaccggattcctttgaatgctatccaaatagggaaaaaggtagtcctgaagccatggacttctctgttcatggtgttgcttcatcattgccactgtctcctcctggcacatcaaatccttttccttgttttataagttgcagtccaaaattcaattccaagtcaccaacactttcaccttcaagttctgattatgccagttcatttactttttcaccttcctctaccaactggtccgacttgtcatttttgtctcctaggcagccattgtcatccggccttgaatcagctgaaccctttaatgttaaagactcgtctttctcaaaaaattcctctttacttcacaaagaagatgtcccttcacccttggaggaattttcagctaatcacacatttggaggggtgaactccaatttgccaatgaaaggttctttcctctcaattgcagagtgcagagggagtcatccaccgtctcttatgttgccaccctccgccagtgaatcctctcacgtccccaagaacaacctggtaagatcattgtctttctctttgcctgaattagatgataatgcggtgaagggtgatacttgcaaacaatctgaccttgaaaacaaaggaaaatgactaatatcagataactatatcattagttcaggtgttgaaccacagagtgagattaatcacaaagaggatcgtagtacagagttatgtaatataatggctgagcttgacatagaggagaaaggaaatgggatgacttgagctcgaattgtgtaaattttggatgtaaatttgctctcacgctcagactattccgtgcgtgcccaatactgattatgatcacatgcatgtcgtgccttataattgcagttgaagtacataacagttgttgaagttaacatggagtccatctttcttaactttaaaggcttcagtcgtttttccagttcctgattattcctgaagcgaaggcaagccatcaactcgtcaggaactaatgttaaaattgatgtagcttgcgttgttgtagaatgatacatcatctgtcattagttaccgcttccattaaataacaaaattaagcttcaaaaacccatgtttatttagaatttaacttttgagtgtgaaacactgatttctttta

SEQ ID NO: 3958 - DNA, 1000 bp, Glycine max
tggaaattgaagtgatctgcatgagaaattatttcaatcaatataacacagaaggatagttagaacatactgaaacttgataaacagaaatgcaatctatattattacacaccatctgaaatccttgactcatccatggagaagccaaaatgaggtgaactgaagaaatatttttgggcaaacggcagctgtgcaagacttctcttcttaagttccagggatcgcccctgctcttcctcttcgattagttgtagctgtctcctaatggatctatggttcccaaaacttcttggaactaaataaattataattatgcattagattgtacaaaggcttctcccacaaatgggaacagaaagaaagcagatcattaaataacttggatgagaaaaccaatcattgggaagttaattgttaaccataagaaataatttaggttataaactagataatgtcgtacttgagttaagttcagtgtcgatatctacatagtgtggtgaataacaaacagggtgctcaattctatctgtgtacttcctgcatccaaattgaaatgcacactgaaattattatggggaaaataagacattaacaatgtttaagagaattttaccaaaaggtatataagcagaagcccttaagatttcttaagatgtaaataccaattcaagatactacatttgtccatcttactttgcatttaaagaatagagagagacagagcagactagttttgacacttcaaacaatgcacttgctattcagtcacaggattgatttacttggttgtgtatgttgacaacaacattattgtattgtacatgtaaagcaacatctctttctacattttggacaagatcttagcaaggttcaatatttcttgggaatagaggtggcaaaatccaagaatggtattgtcatttcccaaaggaagaatgcaatggatatcttagaggagacaaggttgatggatgctaaacctgcagagcatggaagtttg

SEQ ID NO: 3959 - DNA, 1199 bp, Glycine max
acagtgctagtagatcaaggaaaggtgggaaatgatgccagaatctacttaatatattgagagacccactggaagccatctccatatcccatcttgcggacaatgctgcacatgaacacttctagtggccgaaggttcgactccgtgaggttgaccttccccttccctgtggtgaaattggtcaggcctagatgataacgtagctcttcttctgatgcagcatatggaatgtcaatcttgttgcctagcacaagaaatggaacatttgccaatgattcatctgaaagtaaggcatcaagctccttctttgattctgcaaacctctctttgtcaaaggcatcaaccaggtaaactactgcatccacctgcaaaaccaaaagtgtgtgtgacttctaaagcaataccaaaagtttccaagcagcattggagccctggcagattaggtatgtgtttacaaacaacaattacaatgaatccaggggaataaaatgaaaaacaatcatcaataaagaaactaccaacctcaataagctatggctcaatggaatacaagtcatgcatgacacacaagggcagaaaaaaaaatcatgaaacaaaaatatatacttgaattgggagtgtagaatggcaatgatctaaatactctataataaccgtcaaactaacttcatgctaatctcaacgaatagctctcctccctcaaggcaaaagagaatgtatcaatttagaatttttacttctttttaatttcaattggatgtatcaatttataaggaattgtaatatttagctatttcagagatctatgaatcccttatctgttctttccactctcctgtgtgcacttttctttctaaatcattgggaaaattctgaacatgttaggaaagatagtagaaaaaaatactttccaatgatgaaagaagagctatctgtgaaactttcactgtcgatatttacctcccatgaatcagataaataatacaaagacctttatctgtgtcaccgggcacatataaaaatcaagcaagtagtaggttcaaaggattccagaacagcaacagcacgtcaacaaaatatcacaggaaaaagagtggagaagaaaaacaactcatgcgaaaagctggcacaccaaatacaactaggaagtgaacaataacgaataaaccaaccagagttaagagaggtgtcttagccaa

SEQ ID NO: 3960 - DNA, 1044 bp, Glycine max
aatttttttatttaagatttgtggttgttaacatataattccaaacaatatatcttcgccacgtagacatcatgtctatttttgtagaggttgtctcttctgtgagggcacaagggttttggtcttctgtaatatttttcactatgagttttccatttccacaagaccttttgcttgcttacttagtgaattttttaaaaaatgaatctgtggctaatcaagttcctttgtgaatatcaatcatatcagggttctctcgatagttccaaggctgagagcatggtaaagaatctacaaactactggcagatatttgcgcgatgtatggtgatgatatctgaatgcaagccgtgggggtgacgaagatattaataaaacatagagttgtggctagaggattttgaaagggccttatttgtgccacctttcattagtgccctcaaaattgagggggggtgcttgttgccatcacgacgacatttcctacgattctttttcactatattttctaaaggattctttttggttcgtgtaatttattatatactgtttatacctagactatgaactattttacttcagttttctttttgtaatgtatgatgaacctcaaagaaaggttcagagacgcagacaattccttgtactgtatgaactataaaaaaatgtttggaggtaaagaaattattttgtgcaagtgttattattagatttaaatatcccaaaaatgcaataatctagctatcccatacaaattacaatgggatctgtagcaattttcattccccagtttattcggcaattgccttttccaattttcatccataccaatttgaggatatataccatcaaaacttcaatttcttttttttttattatttaaataatacaataaattctgtattctttaatactcaattttattctttttaagaacaatcacatgccaatgccatattagtggtttatagttgttcgcctacaaactagtcaactacccctttttcatattttcaatacctccgttaattaattttcatttaat

SEQ ID NO: 3961 - DNA, 1054 bp, Glycine max
ataaattttaagtgtcacgccttacaagcataacttctatataaagtcagatctcaatgaatagaaccacataaaaagttttcatgacagaaatttaattccctttcttcttcagtacgtgtctaaaatgtgccatatattactgtaagaatgagagtacatctatcaaagacaaactatttacagaaaaccaatgagggggcaggagaggacatcgagcacaagtaaaaaaaatggcattaagcagcaacctttcaccaactagaatcattagttttcttttgatacttatatatataaatttgtgagaagagatcactacctgatccttgaacaaattgcatacgagtgaacttccctcaaattctcaaccttggacttggcttgtcaaatagccaaggcaagcatcaccaatttaagaaagattaaaccagcacctcaaccaaaaactactgccaagaagcactctgtccacttgacatggctcgagcttcagccaaagagacagccatggcgagcatcatctgctcctcaaaactctcgggaacaatgggttctgtggcactttgaaggcttccatcattgtcatcagaccgtggcaaagatgatagttcaccacgatcttctgctgcgacagagtttgtatagctggttgctgtttcagtcaactgtgtcccatggtccatgtcccattcaccatgactcctagtcattgtcacagcttcatccagtggctcctcattgaggttgtcaccaggcggataattagccatatccctaccaagtctgttataaaatcttctggaacccggtagggtgttgaatgatggcatattttcattggtgaggctcatagatgattctccagccatttgctggcgctcagcaagagctgcaatggcacaagcgagacccccagatggagacgaggatgatcccgttggtggacccatgacggatgagacagatgagacggatgaaacatagcgaccgtcagctacatagtgtccagaagtagcatcgacaaaagataaatttctccgcctgccattct

SEQ ID NO: 3962 - DNA, 1003 bp, Glycine max
agagaaatgaacggttattttacaaacttcttattgatcatgttgaagagttacttccagttgtatatactccaactgttggtgaagcttgccagaaatatggcagcatctttatgcatcctcagggtctttatataagtttgaaagagaagtgagtttggctttgatttctctttatggtcctggaatgctttgtaggcggtcactgtttgtattgatattttattgttcctttgtctcttggatgggacttaaacttaaaggggaaagatccgtgaagtactaaggaattggcctgagaagaacattcaagtcatagttgtaactgatggagaacggatcctgggtcttggggatcttggttgtcaggtaatttctatttctattatgcttgttgaaatatattattatttatgatagttatattgaatcacgagatctaatgttgtaatttcttctttgttaacctttgccgtattctcaggggatgggaataccagtgggaaaactttctttatatacagcacttggaggagtccgcccttcagctgtaagtatatttggtccatactgttgcttggttttaagatgttactgaaattttatttgcagatattaagtattggtcgtgcatattgtaacttccatttcttattactcctataatgttatctatttcagtgtttacccattacaattgatgtgggcacaaacaatgagaagctgctgaatgatgaattatatattgggctaaagcaaagacgagcaactgggcaggttcatgatttgtttgccttgctgaatcgtgtggaattaattttttttagtttcaggcatcccgatttcctaatatgccacagtatttacattgttccaacttctctgattccaggaatatgctgaacttatgcacgaatttatacagcagtcaagcaaacttatggggaaaaggtcctaattcaggtattaagcagtgttaagagacaataatatttctggctta

SEQ ID NO: 3963 - DNA, 1255 bp, Glycine max
gacaagactggcacactaactactaaccatatgactgttgtaaaagtttgcatatgtgggaagattaaagaagtaaatggttctaaagtctcttctgatttctcatctgatattcatgattctgctctggcagttctacttgaatcaatatttaacaacactggaggagaagttgtcaaaaacaaagatgagaagattgaaattctaggatcaccaactgagactgcactcttggaattggggctgtcccttggtggtgattttctaaaggaacgacaaaggtcaaaacttgtgaaagttgagccatttaattctacaaagaagcgcatgggggtggttctccagcttcctgatggtggtttcagagcacattgcaaaggtgcctctgaaataattctagctgcatgtgacaaagttgttgactcaagtggtgaggttgttcccctcaatgaagactccataaatcacttgaataatatgattgaaacatttgctggtgaagctctccgaacactttgccttgcttacttggatattgatgatgaattttctgttggaactcctattcctactaggggttacacttttatagcaattgtaggcattaaagatccagttcgccctggtgttcgagagtctgttgccatttgtaggtcagctggtattgctgttaggatggttactggagacaacataaatacagcaaaggctattgctagagaatgtggaattttaacagatggtattgcaattgaaggccccgaatttcgtgagaagagtgaggaggaattgcttgatatcattccaaaaattcaggtacatacatgtcatttaatcaaactttatggcttctcacttcttgtcctggacttgaaaagtttagttagagaattctaagaactatgccaatatctcaaaagaacaattcatcaaaacttccatttgaagtttgatattttcttttacagcttaatgcaagattagtgttctgcttgttcctgctttatatatgctgtgaatcacactttattaatttaaatcttcccatctatgtaaatctatgccaactatcattagaactaatatatttgtaataaatggatgccagtgatggactattagaatttagagtatattgggtaactctcgaaccttgaaagtaagggtttggacctttgggacctacactactcttcactatgaagaaattcttctacaatcattttatgatatgtctatatctgcaggcatgcaa

SEQ ID NO: 3964 - DNA, 1180 bp, Glycine max
  misc_feature (1165)..(1165): n is a, c, g, or t
  misc_feature (1170)..(1170): n is a, c, g, or t
aaagacatatgtctaaatatatttaaaataaaaagacataacaaatacattaaaatatttaataatatagaaatttgtaaacctaagatccatgagagacatggaatattacaccagtattatttacagcagtattatataaaacatagttgttgattgcgcaaacacatatgttatgcaatgataaaaaggatgtctcattttttttcaaagttttaaactataataagaaaggaaggaaaatatttttgattcatgacaaatatattgatatgtatcatttatttaattaaaaatattaacaacatttaaatgtatatttataataattatgtataaagaaatcaaacactaaaattttaattacatttatttatttaatgcattatttttattttgttattattttatgtaaatgtttatacaatttaatctttttattattattattattattataatacaaatgtttatgattatatctatatcatatatttatatacagtataagatatagttgttaattatgtgtgtttgcactagctaggcatggcaacctgacccggatccatatttgtgggcactcgcctgaattcttctcgattttgacaggaaaaaaatcgagttaactagattcagattttctccacatcttaaatttgggggtgagggcaagggtgattttggtaatgctgatatctgctctgctcgtacaactattataagaagaaaatcctattttcacttctcactctcattttgattcttagttctcgtatagtttctctctcacaccactcacttacgacacaaaaccttcacttcacttgttccctctcacgatcacgcaccattgttcgtcaatagcacactgccaccacacacaacacactgcattggtatcgccattcacacactggtaccgtcgtctcacttctcgccgtgacgatgctcgcgtgcccccctacttgcacgccgccaccagcccaccgcacaagtactttcccgtctcaactctgaatcgcactttaggcttatttgagatgatttaattttttttttttattgatcttccaattccatgatttaggttctgttctgatttgttattatatgatgaactttcttagaaattatactttgtcatgttttgctgcaggcatgncaagncttggcgtaa

SEQ ID NO: 3965 - DNA, 1080 bp, Glycine max
ccagcttgcatgcctgcagaagtctcaacaagtcttgggcaaagcggactctatctgacaatgatcaagctcatccgaaaggtgagagaaagcccagcatgcttcggatacaacatcttcatcgtcattctcgtggatgagcccacaaaggacaggcaaagcagactctacctgacaatgatctagctcatttgtctctaacttaagactaatatacaacagtatgcttaatgtggagcagagaggataacatgatacgatttgtacagtgtagtaaaaaatgtatgcacacattgatttaaccactgtatttgtaatcattgactgaagttaggaccactcaaattttaaataacactgatttactgaaataaatcatgaatcatcttatcatcatcatctaaagtttccaaattattaaatgtgtgaatgcatggaatccaaatcagtttcacaagcaagattttatgaaatgtccccaacctgttcaagatttaccggaggtagtccatggaccaaagaacataaacaaaacgtagcaaacctcctcaatcttgattgtttaccaaactgatgtaataatggcgatagagcaccatggtcaagaacaatatccctatagcttggggattcgctggcaatgatccctaaaccaaatactatctgttcaagacatgggaaaccaaacttggttaagtaaaaaagttaattttttgtttctttggggggtgggggtacaattacaaataatcaagagaaagctagtaaaagtattaagaagaaaacagataaaaaaaagagtcattaacaaaggaaattgtaccaaaaaaacagatacaattcttaggaaaactgataaaagacttgacctcttctctgatatcttgatttctactagagtggagaagattcaccaattggggaagaacaccaacttcaacgataactcttctgtgttcagctggtccggaagcaaaactggttagaatacatagagcttctaactgcacaaggaagaataagtattgtgtgagtaaggttagtagactaaatgagaaagagaaggggaatgcaacgcat

SEQ ID NO: 3966 - DNA, 1242 bp, Glycine max
  misc_feature (871)..(873): n is a, c, g, or t
cagcttgcatgcctgcagttctgcccccgtcaaccttgaaagaagagcaaaataggggattagctgtaacatgtacagttaggagttcagaacctttggaggagtcaatggagaagggtgtggctaacgactctagagtccaggaggaagcaaaagttgataaagtagaaaccgatattcaaatggattcatccattagtcagactttgcaagcaaaacatgagatttttcaagaaaatgtgaattttccctcccatctaatgacgaaggaagaaaacatagaagtctcatcctcaaggcccctatctatcagttcatctccatcacatgaattgaaggattctgaacttgaactaggtgataaatatatatctccggttggtgattctcagactgaatctgaagataatatgttgaagagcttggatttagtttcatctccttcagttacgaaggaagaagtgctcagttctacatctgatattgatggttctgaaggcctttcgatgtctctgaatgttcatcaattagtaactgtcccggatgctgtcgagtcttcatcatcccaagtgagagaggaagaaaagattggagtatcttctgacagtaaattagttgtgaggtctgtatctgaaaatgacatggaaggatctgatcttttgccagaaaaccctgtgctggaaatcaataaaatgtcatcagattccccaacgattgttagccactctgtgaagggtcgagtgtcatttgtgaaagaagacaattcagaaattaaaattagtgatcaaatggatgcttctcatgtctctgagaatgatttagaaaggattacttctaaatgcatggatgtaccttcttgcttgcagatggnnnagggagataaggttgatatgttgtctgacaagggccctctttgcagttcccttgcttctagtgaaccaagagaccctttgattgagaatagtagagatggcatcgaggtaagttatttgtacatatttagcacatcttgctctgtattttttctccaatattgaactgatttcttttacacaggattctgttgcaaatccattaccacaacagaaatcagaatgttctgaatctgggaaggttgatgaggtgaagacatctgatgttgtcagggttgatccaggactgaagtccaaaaacacagattttccttcttccttagtgatggagcaagataaagctgctgcatcatatgatagcccactggct

SEQ ID NO: 3967 - DNA, 1068 bp, Glycine max
atatagtaagtacttataatctcttgtcgttgtgaaatttatccgttccatctgtggtcttatatattcttctaaaactctcttttatccatatgtgtatgtgcttaacaggctagctttgttgttttgaatgtaatgaaaagtactgactaatatatattgtattgcttatgcaggtgaatttgatgatgttttggacagaagtagctctaattctctcactgattctgtggaagacatacaaattacatacaaagattttagtagttcatctgcattggaatctaatggatccactccaccagaaaaatacgcgacattactggagatagaagatttgattttgaaaacaccaagtgaatctacacttattagagacttgtcattgacgatcaaggaaaaggatagtttactggtaagacatccactggccctcactcaccaccaacatattaagaagtttaactttgtattgttaagttcataagactgtagggctatacaaatgcatttctgaatataatcaatttaacaggtaatgggaccaagtggaagtggcaagacttctttgttaagagctatggctggtctatggaaaactggaactggaaagatcacatactatgtaaaaggtggagaatatcctgagcaatccatttgttcagatgtgaatactccagtaaataatgctaatgacacatatgaagcacgtggaaaatgcttaagcagaaaatctggaatttttttccttccgcaaagaccgtatatggttttgggtacccttcgtgaacaattaatgtatccaacttggacagatgacgtagttcctatgtcagacagtactaaagaaaaaagtatgtgatttctagtttcttttcaccccaacacctattgtttttagttcttacgcagattccatactttttttttaaaaattagaaacaaatgtgttgtgctctatctgtctagtttcatttgctctattgtaatttgagacttaagacgataatactactgtagttgtgggtctaacattggtgatgccgaaatgatgaggatatatttctt

SEQ ID NO: 3968 - DNA, 1180 bp, Glycine max
tcctggatattcttttgatacaattgtgccgatgatggcatcataacgtgattaacaactcctgaaatataatatggataagcatgttgagcaggcacagaaccgtgacttccatttcttggatgcaccactccctgagaatgttcttccttgtaatgcttttgctgtgaaacttccatcgatgcaggtggagtacaagatctctcaatagagaaagaatcgaggatactattgctgctcggtaagtcatcttgagaatggtttccaaacatttctccatttttgtgtgttttaaggccattatccccctgttcagtacatgcttgattcatatcttccatcctaacttctgtagtagtagtagtagtagtagtattgttactattgtcaacatgagcactctcttcaatgttgctcttcaatgttgttgctttgacataggtgaaaaaggctgatgactctccaatcttcagttcactcttctttggaccagatgaaaaatgtcctgcaaaattttggaaaatcagagagaaatcagtaaaaatgacacgaggtactcacttcagccaaactttgttcaactttaggactcagatatcgcatatcccttttaaactaaggccatttttaaaattataactgtatagctatagaaggaaaaatatgatgtgcaaactaccatcaatagttctgctgcttgatggatgctgccttggagtacctgcatgtgtaataataaagaataacacttaggcatgaacaaatgtatttattttgattttcatgagaaatcagactgaagatatacagatcaaaatgggctaaaagaagaggcacaaagataggaaaaactgaagtttacaataatctgtgtcattttatggcattcaaacaattgtcctatacaatcataggaagtaactagcagagcattacattgtataacttcaacatacatgcacaaaattactatataattttttatcttgaaaaatagtagttgaaggaaaaggaggagcagacctgttcgacgatcacttattccaggcacatcaggctgatattgtgatacaagataactgggaagctccaccacaacagcagcaatggtggcaatactagcctgaaatgataaatgatatacaaatattataatgtatcaagtaactacatctctgat

SEQ ID NO: 3969 - DNA, 1222 bp, Glycine max
aaagcacaagagaacataattagacagacagccagaagggttttaatatcaacaaagtttttgtcaattcaaagagaaaatgaagtttgtttcagccagtgttgccataagtggatataagtacaaaaataataataacccaaaatgaagaattttccagaaagcagagcttccctgtccaactcatcaatcatcaatcaaatctgtacttgcccttgcttgctctactaaaaaaaatatcttgactaaatgcaaattatttcaagaaaaaaaatggaaaacatgaacataccatttccagtttgctgctgatacagatgcagtatacctctgtcataataggaaggaatgattaggaagaaaaaaagaagcaggagacagagtttaaaagatatgaagtgggatacactgaaatattaagaaaaaatgttagctgctggagtaaccctatttaaataaaaccatgtaggaaaaggaaaatattaagagaggattgcataagatgattggcatttggtataatagtcccccgaatgaaaacaaacaaaaagatactaaacaataaggcagtcctcacattgttttgtatctaaagaaaaacttacttagaagcttgctcataactgaagaacttaacagcagaattagggacaattctagcacaattagtaccattccctttgaaaagtccacgaaatccttcagtcctccatatatattttaggccttgtactgttccattgtatttaatgttatgaggattctggacctgcatatggcaagaccacagacatgtcatatgtagaaattaagatatatacaaacaagcaagcttcgatacagtatactttgatcccagtatatacaagcaaggataatttgttaaaagtaatgaaattaaatagtatgtttgtgtatctcgtgtttcaatgcttttaatattcataggcattagtgtctaggaagttacatcggtaattattatcctagggaatagtctccactagtctatcaagaatctatatacatacatacatacatatatatatatatatatatatatatatggtatgtagaacctattgactacattttctcttgaataataaagcattctcgttctctaaattctatccaaaatatttgttctatcttcctttaaattccaccctacctctaaattcaacaaattcatgtagatctaaatcactaaataaactaa

SEQ ID NO: 3970 - DNA, 1073 bp, Glycine max
atttattattttggtacgacaaactgtaaatcttttttcattttcttacaaagtctcctatcggatacataatttcttcttcaaaatcccctttcgaaactatgaatctcattgcaagttagctcgttttaatttggctgtggaagtgttcattacttgttgattaactctaaccaggattttatctcctgatgtgtataatttgttgatagaagcatttccttgtctctaggatgtcccttcagtcttcacatcacatgagcataatttgctgattaaaagtttccgttcttcatataatttccactaaacatgaatgatacgggtgctaataagctagagttccttctggttttacttgaaccatttagttttatgttgttttggtttgacagaaatgaattccagtgcagaaccttttctcagatgattgttcactgtaccatgtctttgcaggtcacaggggagttattagataacttaacaagctgggatgcattgcgtgctgcattacctgttggtacagttagcggagcatcgaaggtaaattttcccttgaagaccatagctttcgtttttgcagtctctctccctgcggatgtagtttgtaatatatattggcgcttcccttcagttgtgatattacttgtgcttcataaatggtttggttgtgaaaaaaggttggccagcggcagttatcactagatatctgagaaccgcaatataccctttgttgattgtcactagtttaagattgcagtcttggttcgacttgtttggtcctaaattgttctcattattacggttgctgtaaaacaggtcaaagccatggagttgattaatgagttggggggccatatagtgggggatttggaggcttatctttcaatggcgatatggacatagcccttgctctgaggaccatagttttccctacaaatgctcgttacgacacaaatgtactcctacaggatatgaagaaacgcagagaatgggttgcccatctccaggctggagcgggaattgtggctgacagtgatcctgctgatgaacaaagagagtgcgagaacaaa

SEQ ID NO: 3971 - DNA, 1034 bp, Glycine max
gtgataacgaactctcaaaaaaccagtggatagataaaagcaacatgaatgtcctcccacatgagtccggtctgcttgaatcgtaggcactttgacaatgctgcctttaattcaacttcttaaaggggacaaagatcaactccgacataggactagtgtcatgtgattcattagaaactctagcatccataaagggggctgttaagcgggaaaaaaagaatgggttttatttgtttggctaaactattcatttgatcctttgatccctatagttgtcctcatgttaagtttcagttcttaaacgagaaaactgtatgtttacgttaagcttttggtccaattgctaacaccagagaatgtagaaccgttacaaaatctttctgacagggataaactacctcaaaaaactgtgtagcaactaaaacatacaacaatttccttgtacagactagaacttaaaatagagacaacagtcgggaccaagtgaaaagtttaacctatactgttttatctccaacaagttttatttagtgatgtagtcaagtttctttcatatatcctctcctttcacaaacttaacaaagtttaattcccttcagtttagttctcacagcttgataaccccaaaaaaaattacccctgtatcctacatttttttttatcagcaaagtaacatgtattataataataaaataagtacaagtggtactattatatttacactgttgccctactatagtaaacacacaaagattgttgtaaagaaaacaaatatatatatatatataagcaaataaaacaataaaaagagcgaaaaggaaaaacatacagcatagtacacaaatatacctggtatcctccgataaccaagagagtggagtagcttgggtgaaaaacacaagaatggaacatgtttccactggaagtaagttcatgaatgcattccccagaggcaagtgaccacactttgacagattcttgactcacagatgccaagtaatctccatttgtatcccaacagacacagcgtacct

SEQ ID NO: 3972 - DNA, 1133 bp, Glycine max
ggttctatcaaaataaaggaatatttttattatagttatttggacagatggcaaatgacaatgcaatttagtcatgactcatgatccatgaaccaatacaaataccatcttgtaactagagatgtgacgtgacaaatcaaaagattaatacaaagattgaggatttgtttggttgagtaggtgggaaggtggaaaactaagtacagagtgacaatatttctcaacaaaataatagcccagactaaaattgggttatattttccgctcaaatttctataccaagataaagtgtttttcattcaagccaaagagtcccttagtattgacagccaaagagtaaatgagaggcaaaaactgcttgagagacttgtaatactttagctgggaatgacagaagacagaaggaaattcatgtaaggcagggctagtgactgaaatgaagtcatcacaaggtagccatactggaaggctaggctggatcctctcctttcaaaaaggagctaatgtttgttgggtagtttggtttgacactactttacacccaaaaagatgttatgtctgaataaaattaggagatggaagtcttctttcctttttcgacaatgaagactaaactcatgagtaattcactactaatcacatggaaactccaaattcaataagaaagtgcaaaggactcttaaaagttatctaatttaagacacatgcaaatggaggtatgtgacacatttatactaggaaaaaagaataggctgaataggagggagctaaatggaggtgatggaccacatgcgtatgaagaggcaagaggaattggagaaaatgatcagtgcagagaacatgccaatggagttcattagaagagagatggaaagctgtaacagcctaaacagctatactgaattgctttgaggtaacgatagcatgtcgaaattgaatcctaagcacataactgaggtgccttatcaggaattattattggggagcaagtctacatcctgagtggagaaggtattatgttgtgataccagaattgggtggcataaatatggatgggggtacgggaggaaagagagggcaggcaaatattgagcaaggaaagcattggatggctgcaggcagcaagctggcga

SEQ ID NO: 3973 - DNA, 937 bp, Glycine max
acttgcatgctctgcaggcaagttcctgaaattgttatctactaagcaaatcctatagcaaccttgtggtgaccatgctgtccacatcacaatacccctgaccatagggtggccatgtaactctctaagagcaagctcaaagtactgtgactgcacaaatcataagtgaaaaactataatcaatttttaatgcataaataaatgggtaaaatactaaaaaccacatttcatacaaagaacagcacaacacaacataaacactttctctaaccatgtatgcccggcatgcgaaattattagatagtttggaactattattatcaatctcaattaatctccacatgatatgatttatattaattctttcatgcacattgaaaaactcgactacttgtcacttagagattaatcaggcgggactatgaacatgtggtgatcatctaataactacttgcggtgaataagctattctgccaacaacatcatcaaattgttgcatgaaaaataattgaactttacctgcctaggctggcttgcaacatctagttctgtaatccaaattggcaaacgagtagcagcaagataatcgatggaagctctcaaataaggaaagttaatacccggaccagagaaatgagcctcaagcccaattccaattggcaatcctgcattcccaggataactttgaatttttttaagcttctggatataccttgcagggattgacacaccatctctactatcctcaatggtgttatattcattcaggaacaaagttgtttgtccatcaatattatgagcctcatggaagatcctacctgaaaaggcttgtccaagtttaccttcaaagaatgaaaagtgcaaattttcattcaccacatcccaagaaataagttggcccctatatcttgacacaacggatctcaccctcttttcc

SEQ ID NO: 3974 - DNA, 1266 bp, Glycine max
aatacattttctaatatgtttttttaatatattttttattagctaaattttttttaaaactacaacaaaaaaatggtctcagaatttgaataagtaaaaaaaagtttaaaataaatggacaaaatatgtaattaattaaatttcaaacctacttatccaatttattttcccattcaaaaaccagctgaggaaaaaaaaacaatataaagttaatttcgtgttgaataatgggtcgattttttttttcattaaatatatattatctaaactttcatcaagaccgatcctagtagttattttctctcaaggtagtaaaaaggatttaaggaaaatttcagacaaactaaaataaatttaactaagttaaaatgacaaaatggattaaaaaatgatttttttacaacaggaataaaaaaatgttattaatacacatttactgtgacccactacttaaataatttcactaacaattttataattttaatcaacaatatgttaaaatatgtaaaaaaaatgttttttaattgttaaaaaatatattactagtactcgcaaacaggattattatatatctctttgtcactataatggttagtccttttttcctgccaatttattctttttgttactcaagtcatttgtgtataggagtgagaatatgcaacctgtcacgatgaaaaataaattgtgagaccattttttttaccagttattgtactagcttcgcttatagatgcaaaattattcatatgccaaacatgctaaatatcacgatttagcatctatataggtaaaatacacattactaaggatttggctccctcattatgctgtttctaataatctcagtcaaatttcattttcaaactatattaggtttaaataaaaacagagacgcgggggaggggggatccaaatgaccaaatacaacttagacaaaactgtaataagtgaaaagaaaagaaattgatataaaacatacggattaaatcagaccgaactgattgcaatttttattatatataaaaaaaaaattacgacagcataactatttaattacaaggaaatttagcggggggggggggatgggaaggaaaatgtattaaaaaatggtgtctatcgtaagtttccttttgggaggagttttctctatgatctgcttctgtaagtccataaatgaagaacccttgttagcaaatagtcttcgcaagttgatcacagaaagttcactaaagttagcaacggtaagatcagcctgccccaaat

SEQ ID NO: 3975 - DNA, 1054 bp, Glycine max
ttgcatgcctgcagtgcagaaaaactaagggaatgacttatgtctactaagagctttaactcaaatggttgagcacaacgtgtgagttgttgtaagttacctgtcttcaatttttatgggtattttttttttttttttacttatgtctttattattctttgcctcatgctttctgtgacacggccacgtggcaattgcagatattttgaatttcgatctattctgtatcttccacagcttagcttatgcagtttgacaactcatttggtttggaacgtgaatgttgaaaaagagttttcttatccacttgtcatcaaagatgcttctatgatcattataaattctattcctaaagggtatattggtgcactagatcaggactgatttaatttgcaacaaggccatgtggccatacattaagaccgattctgtaagcactgggattggaaaatgcagaacagatacatttagagtgtgtatcgatgagaaaatttaattaaatttttttatttttaaaattttgtttggataaaaaaatttaaaattgtgagagtgaaagaaaattgaatgcaaagagaagaggcacgtgtctctgacgtaaaaagaaatgaggtatactatccttaggtaaaaaagaattccgtagccttaattggaggcgacatatactatcctcgccagcctcgcggtcgcaaatttgcaattgattagtcaatggtagaaagaaatctgaatcattggaactattactgtaaaatataacagaaagatctgtagaatatttggagtattcatttgtgaagtgagggtcacagttgattgctttgtccgctatactacaactatactagtactcttgtatcaatagtaattccaatttgcaaccctcccagttccagagaagaagtacaatggtgaaacacggcatgtcatcatcatatcctaggaagtacgatgtgccaagcaatccaggactcgcagtttgccatcgtggttttctccgaaaactatgctgactcaaaatggtgcttgaaagaactggtgcaaatactgc

SEQ ID NO: 3976 - DNA, 1177 bp, Glycine max
gttttctttcattgcaggtctgttgcttgtgtccatgtttttgttttatgaacacatgcatgattatctttgctgcaaaattgagacatgaaagttataaagaaaaagctgcactcagccatttttatagtcattcattatgtttagagttgtgggttcttaacttcttaccatttttataacaccataggagagggtgcatgcaaggatgtaggtaacaggtgtatgattggagaaatgtaatagataatggggcaggatgtaaattaaggatcctgaaagtttgctagtaaccttttccatattttttctgtgctctccttttcttgtggcatcttttcactttggagtatgagattgtagcacaggttagaaacatatctatttttttcgttttgtctaggtaactgtgtgtttgcatgcagtttcttgcatgtctttatgcattgcatttgttttctaaaacaatattagtttaactgataattttttaatttatttagatcatattattttcttactagcaacaacatttgctctggctgtgtatggaattttacatgtaaatctacttttgctgatattttcagatgtaaaagtatttcagcagaaacaattattagggatatcatttttattttatgtaccattaagttgattgattaccttacaagttgcaactcaataactaattgttacattgtaatattgtatcccaaagtctgccatacaactacaacaacaaagccatatcccaaagtctagcataaagattgaaatttttgcacccctataaatggactgttgacaaagtgttgtggtgctcactttaattatttataggtgttaatgaatttggacatttattgttgttgacataatgttttataccaccccatgttcccaattatgaacatgtttgaatcagtgctaagccgtatttcttcctgatagatgaccagagccaattctggtgtttcttctcaatctcacaatggatgaagttataataaggcttgcaccaataaactatgtatggataaagttataataaggcttgcaccagtaaactatgttttcagatccccagtccactttcaacttctaatacacttttgtgttacaggtcttaaacctagtagttgatgccttaactcatgaggatgccagtgttcgc

SEQ ID NO: 3977 - DNA, 1034 bp, Glycine max
cgccagcttgcatgcctgcagctgtgttactgttacaggtatccacgactaactatgaaatttcataattagttaggttctaagtaaaatcttttagggtcctatttaaatgtttttgtaaaaaattctgaactttagggaccttttcaaaatttaatggaactactgtacagggacctagagttgtgtaacctgaaatgcctcctgggccccctattttttttttccagaaaaaagaaagaagtgacttggacctaccttgtttcctacttgaatgtgaagataagttaattaagggtgcgtttgatacagtctagagtacagtacaagaagaacaacacaaaacaaacacttgagttacaggacaattttttcatctgtgcattatttgatagccagtggacagcacaaacaaaatattataaaattactgaaatgacctttttaatgttaattattttaatttgtcaattttttttaatataattcatattattattgttattatttaaacgaatctcaaggagagagaaaacactaacagaattgaggagaaagattgtgatattcaacccaaatgagaaaaagttacacctcagtctatataggcagttacacagttgtaactgtcaactgactctagtcagttaactaactaactatgaaagcactgagaactattgttaagcctacacagtagctaagaaaagaaaagactctatcgagtaaatatactcctatattatatattaaaaaaataatataaatcattagtgtttggattcaatgattcaactcactcatcttatgcaattacgtgagctgttaggaagggcttcaattcaattgaagattttttaaagcgtgaacagggctgagatttaagaagtaagagaatcaattggctgagatttaagaaaatcaattgtacgtagtagggcttcaattcaattgaggaaattggtacaattttttgcaactgaaaaaactccattcaattgaatatttaatccttcaaattacggactaaattt

SEQ ID NO: 3978 - DNA, 1053 bp, Glycine max
attctcaaactctcacgccacatactgtaaggttaataaagataaaatattaaacctcgtaagctttacgagatctaaacaatgctttattttattaggcattgttccaaccttctgattcatccttcatggtgtttggtttgtatgtatggagcatgaagttgcatgcaccaacagcctcttcaactgtgagatagatccatttttgacccagttcatcaaggaacttggctttgttcagcttcttcattacttcgcttccaggattgaccaaagcaagctacacacattggaaggaatgattaaataattaaaaaaacaatttaagtgtctctcaaagtaaaactatttagccaaaaatattagttatataattagcttaatgagaaatgctagaacacaatctctaccatactttttaaacacattttttattattgattagaatttatcaaaaatcacataatttaatagatttcacttcttatttacgagctcttttcttgatattataatatttaataaattttaatcaataataaaaaatatgttcaaaaaattatgttaaaaagtattttgctatcacaataagaggagaaaataattacttgtaaccctcttctgtcagtagtcttcttgcactcttcaagcatgcttattccgcttgtatcaatgttagcaacagctgcaaataaaatcacactgcaagttagattaataatcttactaatcacattgtcaattacttcatttctttaatgaataaattaccagtcatatccattatgacatattgcaaactggtttgccctgtagctttgattctatcttcctcttcatcaatccaccttgtgatcctaagaacaaaattttgtgatgaatttacaatttcattggaggctgtgtttttgcgtgcaattaggagtaaaaccgctggtggcttacctttctcttaaatagcttgcattggcaaagtagatgggtgcatcaatttcaagaattaggattccaggaatatggtttgcatttggatattgttccacatttctgtat

SEQ ID NO: 3979 - DNA, 1177 bp, Glycine max
ttatatattgagagagaaagagaattgtgggtagcatttgttgtttgcattggatcctccgcttcagtctcaacatcctaatccttccttctctctctcactgctacaatccaatccaaacaagctagcttgagagaaaagaagaaaatcctttcaaataaataaagtttcattactttatgttgataggtacacccagacccaatttcatccaccatgcatcttttttatctcctcgatctctagccatatgtatctaagttctcacctaaacctagctatttccacccttattacgttaataatttgttcttgatcgatgttctctgaatccggttcttcttcgttttgcttcatgggagtttcttcgaattccaaagtctttctctctgacaaagatctgaaaggagtgatcaacaacatggatccattggtacacaaggaagggtgccaaactttgatccaagaagatcaccagcttattagactcaaacaactatcggtgcaacaagaagaagaagaggaagaagaaaagcaacaacgcaacagcaacatcatccttacaacaaaaccggtgggtcctataaacttgaaactagagattccgtcttcttcttacgtgggatcagagaacgatgacgacgggttgaagactccaacatcttcggaccacaaaatcccggtgatcctagagtgcccatgtgcaccaaagaagacaaaatcaaagccagccggcacgaaaagaaaatcgtgtcgaccaagaattgttcttgatctgtacaacgatttggaatctttgttccccgtgccgtatggtgttgatcttgggggtggcgttatgaataagagagtcaaacagtgactgaaggggtgagctagctagccttaaattctctagagtcctcctgatcaatattattcattaccttagcttgctaattttaagtgttggtgctgtgatgcacttgtaactctagacaaatattataacatatctctcatagtgcattgatttagtacgcataaagcttctccctctagctagcattaaattgaatttcaattctttctcgcttcctttaagaataattttcttttgctatgttttaattaaattgcgagtagatattttaagttgtattataaggaaacgaaaaagtagaatatgatcatctgc

SEQ ID NO: 3980 - DNA, 1171 bp, Glycine max
tgattcgccagcttgcatgcctgcagttagctacatgtcatttaatgcaaaattttacgcgtcggtttgttccttggctaattttattttcttaatgcgtagcccaaattaaagtacacattattttaggcctaatgtgctgtttgtatgactgtaccataattgagaattgtcttgcagccaaatagtactcgatatatcctactaggcctaatttgcgctgtctctatggctatcacatattttaatatgtaactactaacaaacgtacacaacgaaagtgtgaaaccaattttctcttcgttgtgtcgaataaaagtaatgtcaagttaaaagtcatggattacgcacatcctaaggggacatccgcggccatacaacaaatcaaggttttcttgacggtgttcgtacatcctgcttatgtcggcgcaaagatttttccacgtatatgtgttcatacatcattacatcaataacattttatattctttctctggcgataaacattcctcgctctacgatccaaagtccaaacatgaggtctctaatttactttcaaataaaaaaatatggggttacgcaagagtatagtagattacgagtataattttttaagtatttaaaaatgattggtatagtttttttaattgcatcaataatttacgatgctccactttattttatttgagataaattaaagaatgccaatattaatttttcagcaaattctcaaattagaggcatgcaaaagtggctcaagctatgtagatgggaggataaccattatgcatttatgaaaggccgaatatatgggcagcaatcaaagttaaaagctactgcgacggggtgaatatagaaaaattatcaaacaccctaaaaggggtgtgtgggaggaacaagcggttgagtctttttattggccaataaccaaatcaaataacttgaaatttttttataaaaaagtaaacccaagttagccatgtctattggtgcagtagtttttgtcattactttcatactaagtagcattttcataaaatttaatgcttaaataatctagattaaaacttttttaaaaaaatttatgagcttttaaacaattttttttttttgagagagcttttaaacaattgtatttttttaagtaattatgtaacttaaaaaaattgtt

SEQ ID NO: 3981 - DNA, 951 bp, Glycine max
agcttgcatgcctgcagtttgcataactttaacaggcgggtattctcttgtctctatatctatgttccttgttgtgctaattctttctgtgcctggtgccactccaacaagataattttgccttttaataagatcagaatcccaaattctatcatacgggtcatccgggtacctaagaaacatattggcttaaaaatgttaaaccaaactcatgtcatcactcatcacattagttagttgttcttcccaatcaagctaaccatgctgcaatttttccttgaaaaggcaataaggttttatacttctactgatgcttattctctgaaggaaaattttggaaagtcttctcttcattcatttatgtgccaaaagcaacattaaatttaaaaataaaaaaaagggagctttcacacctgacagcatcctcagttggagcaccaaagtttattcttgcagcaacttccaagaagaaattgtcctcaaaatccgtggcatacatggaaagattcaagggccgcaactcaagggtagatataaaaggagaaccagttgtagcacagcacatgcaaacatcaatagaatttgagggtgctctgatgatcatttccttaacatatatccttgaggcatcatatattgacactgtggcccattttgttgcatccaagtagagctgaaactgagggtaagtgtctccactgtccaagcttccatactgaaacgttgctctcaccaaatatcttcttctctcttctgtgcttagtgtgtaacagtacttcttgctgtctatgggaaagtctcttcgcttttgatactgcaccatgcttctatttggactttctacttccactgaaatgccatgttgcatgatcctagaatctgagatccatgccaaccccgtgctggtatcagtgtaattacttgtccctccacaatcaatgctaacaaatt

SEQ ID NO: 3982 - DNA, 1161 bp, Glycine max
atttgatccaatgagaaaaattgattgtagtatatgccctacagcaaattttcaacaaccagattaaagaacaaaacttaggataaacaaaacagaaaatccatatccatatatttaacaaaccgtaaagaaaaacaggagtaaagcatactttgtttttatcattttatatttagattaaagttgccaaactaaactcaactcaaactcactatgtttaccttcttttttcagtagatagttagcaaaaaatccatacattaatattggttgcaacaaatcattataaataacatcataaaatggaaaaaaaaaactaaagatagttgaccagaacatatatcaaaaccatttagtttggggtctctgctgaatggtgacacttagaatagaactatttctgagtaaaatagtacccactacccaggaaatcagataacaacaagaggggggatgtatcttgtagataatataacaagagttgaactatgatacatgtaacagaaacaacaaattatcaattctaaaattaacaagtacctttatgtgatacaatttcaatgctacagtcaaagccaccatggtttcgatcacaagagcagaagctgagtccaaaaagtaaacattaaaaacagtaaatttcattaggaagttgtgccacaaatacaaatcaagcaatctggaaagtctgtaacttagtatctgactattttacaaaaatggctcagtcaataccaaagattcatatggttcttatctactaatttaaaacaaacaaatgaaatgtaaccagaactaatgaattaacaataagaaaagggtttaacataaacctgtatgatgttaatccactggcatcaaaagaatatttacaatctccatgagaggagcattgttttgggcatccttcaagtgaaatagacatgacagtttgtgctttcaaagaatcactgccaatataaagatgtcttagacctataccccaagttccttctctagcataaataatgtaaaagtcaattttgtcatcacttgaatcatatagcatgaaaaacacggattgatcactcttccttgtcctgttagcataataatagtcccagctatcaagagaaggcaatccaccaaatctagcatagacttcataactgatcttcacat

SEQ ID NO: 3983 - DNA, 1206 bp, Glycine max
atttgatccaatgagaaaaattgattgtagtatatgccctacagcaaattttcaacaaccagattaaagaacaaaaaagcacattctaaggataaacaaaacagaaaatccatacccatatatttgacaacctgtaaacaaaaaaaggagtaaagcatactttgtttttatcattttatgtttagaccaaagttgccaaactaaactcaaattcactatgtttacctacttttttcagtagatcgctagcaaaaaatacatacattaatattggtagcaacaaatcattataaataacatcataaagtggaacaaaataaaccaaaaagatagttgaccagaatatatatctaaaccatttagtttgggttctgggctgaatggtgacacttagaatagaagtatatctaagtaaaatagtaccaactacccaggaaatcagataacagcaagatactaagttacagacaaagagtatctgactagataatataacaagagttgaactatgatacatgtaacagaaacaacaaattatcaattgctaaaattaacaattacctttatgtgatacaatttcaatgctacagtcaaagccaccatggtttcgatcacaagagcagaagctgaggccaaaaagtaaacattaaaaatggtaaatttctttaggaagttgtgtgccacaaatacaaatcaagcaatctggaatgtctgtaacttagtatctgactattttacaaaaatggcttagtcaataccaaagattcacatggttcttatctactaatataaaacaaacaaatgaaatgtaaacagaacagataaattgagaacaagaaaagggtttaacataaacctgtatgatgtcaatccactggcatcaaaagaatatttacaatctccatgagaggagcattgtttagggcatccttcaagtgaaatagacatgacagtttgtgctttcaaagaatcactgccggtataaagatgtcttagacctataccccaagttccttctctagcataaataatgtaaaagtcaattttgtcatcacttgaatcatatagcatgaaaaacacagattgatcactcttccttgtcatgttagcataataatagtcccagctatcaagagaaggcaatccaccaaatctagcatagacttcataacgtatcttcacatctgcaggcatggcaagtctggc

SEQ ID NO: 3984 - DNA, 1002 bp, Glycine max
ttgcatgtcctgcagacatttgtaaggagaggttcaaccccctttgagtcatattatttaccagttgttggaggagcatcgtatgattctgccaatttccctctcgagccacttttagacgactcatcatacagtggagaacctgataacatttggactttctttcttctgaacattcctcgtggtgcagctggaggaaatattcacatacagctatcctcagatatgaagatcagttatgaagtgtatgctagatttggtggattaccatctcttgatagctgggactattattatgctaacaagacaaggaggagtgatccatctatgtttttcacactatatgactcaagtgataacaaagttaatttttatattatgtatgctagagaaggaacttggggtattggtctaagacatcttaataccagcagtgattccatgaaagggcttactatcatgtctatttcacttgagcgatgcccaaaacgatgctcctctcatggagaatgtaaattttcttttgatgctagtggattgacatcgtacaggtttaccttgggccctttgcttgttcttaatttatcagtggtgtttatgttttatttgttttctttatgttgttagacatgaaccaagaaagtcctccgcgaagactttcttggttctagacaccttggtaatgattaagacacatggcaaaaaaatcgaatgccatattgtggtcttttctggttgcatgttttgcaattgttccccaacttattaaggagttgaccattttaaatatttactttttgctgtcagcttctgctcttgtgatcgaaaccatggaggcttcgactgtagcattgagattgtaacacatcaaggtgattgctaatttttcatattgacaaagttggttcattttgctaatatggtgtacaaattccttaatccagttattaaaaatttgtataggacatgtacggcaatcaatttttctcattggtatcaaat

SEQ ID NO: 3985 - DNA, 1005 bp, Glycine max
tattgctccttttgctattgttctagagaggtacctatcactcattcacataggaaaaaaaaatgggagaagaaaagtgaaaaccattgtttcattgttctgaatcattttctgattaaccttctcttcttctgtttgtcattggcaggaaagtgaggcccaagatgacatttctcatgttcatgcaaatatttgtgttgggtctacttgggttagtaattttcttgctctagaaagtgttcattatgatcgatgcaacctgaaaacatgttctaaaatttgttcttttcttcttttttctgttctgttcttataggcctgtgattgatcagaacttatactatgccgggctgaaatttacttccccgacctactcatgtgcgattagcaacattcttcctgcaatgacatttgtgatggctgctatttttaggtatatttaaataaacaatcggctaatcttgatcttaattcttttaatttgttagtattagtactattttgttttgtttttttatttgtattgctttgagataacatggttttactctatgtttgggctggattaggatggagaagttggacatgagaaaagtaagatgccaagcaaaggtgattggaactattgtaacagttgctggggccatgttgatgacattgtataaagggcaagtaatcagtttcttggggtctaagtacatgcatcaccccagaaactatgtacctgaaaacaccactgattctggtgaaaaggattggtttaagggctctattcttctaatacttgccaccctttcatgggcttctttcttcatccttcaggcaagtaattaagtgtttaattcaaacagtgtggaaagagtacctcacctacaactactactactttgattcttattcatgagagtgacttgtgtacattatttatgattaatgcaggcagtgacattaaggaaataccctgctcagctctccctcacagcacttgtgtgtgccttgggtaca

SEQ ID NO: 3986 - DNA, 1021 bp, Glycine max
ttgctgtgtttgggatgggattcaaaaatatgagccatctaacttgctgagatccatatcctcgttgcatctgatcatgtccgaagttgaaattaagaaatatatcctacaagtaatgaatagggttgtaccggatctgtgattttactttatacacatcacacatggcttgcccgttgccgtggcagactggcagtccatcattgttgggttcacatctacaatactagtgataagattgcataagcaaaataacaggatgaaatcaatttaactacataggaactagttgtagctatttgattgcccatgtgggactatgttaaatgaagtatgctgagaaggtttgtcaaattggaaacttaagagtaaaaaatatgatgttgtcatttggtgctttcttaaaatgcttaatcttagacaaaagttgactgttatgtaatttcgtagttgtggggtaggacattttaaaaaataaccttcaaattgtttttgcaaaatattctctgttttaacttttaatatttgccgtgacatcaaacagggaagaacaaaagaaaatctgatgtgcctgctgctgatgtttcagccgatgcaatggtggaataaacaggaaaagctttaatattctacgtacttggtagggtggaggtagaagaggcaatgtctgatggtataaaatgttgtaaccctcgactcgagtgattgttatggtattcctatattttattttatttactgacctgcattgattaatagaaattagattaaaacatggaaaatgcttctaccgtgacagcataacgtaattttaaaattagttgctatttttaaattcttagatagacatagtatgaagcagtttatgcacttatcaactgaagtgacaatcagttgctattttaaaattcttttttcgacgaaatgaattttgtttttacaaatcaatcgagttttctttttgttgtgcgcaaactgattttatatcgtgtctgtgaatcttcccccctttcaaatcaaa

SEQ ID NO: 3987 - DNA, 1022 bp, Glycine max
aacaataggagcacagagttcagcttggtcacaaccacaatcgtcacatcctagctttgaagtcccaagtaagtcttattttattttatctggtgaattcactagaattatgccaatgttgagggattaagaagggatttgcttgcatgagattagaaattcatgatgacattagagtttgtatccggtattggataatatggacaattttgtcatttcttggaacataataataataataatgataagacttttttttttctgatcattatcaattgtgtagaactgttatattgtttcagtccacaataacaattagcagtcttcagtacttgtcaaatatccatttttacatgttgccaaagccagattctctttttacccacccctactgctgctctataaacttttcaaaatgagagatttttcagcttataatgcatacatacatatataggtcgtaaaataatttgttaatatattttaataaaataacaatcttgattttttttattagattgtttatgatagaatatatgataagatattctataagtatcgttagtgtaactaatcttatctgatagaatatatgataaaatattatattggtattcctagtccaactaatcagtttgtatttgatattatattaatttaagatacatagaatcaatccagatggaaatttttgtgcgttagttgaagaatcaatgcaaagaattgctgaggtaacgttgaagcattgctgctttcttggccaaattttctcttaatggcattggagttatgaagacttctcgaagaactgctttcttgaccatccaattcattctcacagccacagtcacatccatcacatcctagtttatgttattagggaaatgtgttccaagaaagcagcaatccttcaacgttacctcagaatccatgcagttcaacactttgatgttgtctcaagggagtggatcatctcatcaacaccacaaatcatatcaacttggttttcttctctgaaagca

SEQ ID NO: 3988 - DNA, 1175 bp, Glycine max
aagatatcaagtaggcaaagtagtcagtcatattgggaaatctttaaacacttattgtgggggaaactcactatggtagaaatatttaattatttttgtctttggttttggtgttatactttaatttttcgtctttatagttttataaatttagattttagaccttaatatttttttctgtcttgattataatttttaatttaaattttagtcattataattttatatttatcttgactttcatctatataattttattctatttaggttttattttttatcttactaatatataggatattaattaagtaaaaaatatttaatataaaaatcatagaaaaatagaaaaatatcattgatatcacaatttttagtcttccaaataaaatatttatattttgagtttcttgaccggtgccctagcatttggtgtcaaattgaagtttaaccccaaatctcatccatcaattttaatttaatctaatgatttttattaatttattgaaaaactcacatgctcctagcttcttaaaacccctcacgtaatccgctctcattaaccattattccttctttaaatcataaggaagtttatagaaatccaaggagtaagccgccaattaagaaggcactgtactacacttacacttaactccccggcttccaatgcttcgtatatagatcatatatgttgataaaagtaatgtgcccaacaataaaagatttaaaggtctgatccaaaatgtgttgtacaagcacatgttaattctcaaagttttttttcttaaataatttatggtgccattcgattgtctcctttatttctttttagcaagctcatactagacaatttgcaggcataatgaacaaaatctagtacttggaaagaatttcaattttttaatgctcaatttccagtataccggctgccaatggagttcatctcccatgaagaataaaggtttcagtgtttcaataattgacaatttcaacaactgggccttggaagtggtgtaggaaaattctgaagacccagttctgcaatagcgtgactagttgactataccgcgggactctacaaactaattgaacaattaataatgaaatataatttaaaagagctttgtgtgtgtgtgaaatatgactacaaagtcatcacacctatttataaacca

SEQ ID NO: 3989 - DNA, 1158 bp, Glycine max
aacattgttgccgacatgaggaaagtattagccaaaaatcctcaagttgagcagcagaggttgcacaggagagtgtttttggacaacataaatcctgaaaatcaggcacttttggttagtatgaagtagttaatcttgcataccaatgattctatgctaattgacagggatcttaaatacaattttattctatattcctcttctatataaataattagctacagtacatcattatgccataaacaatttattgacgaagaattcattctgtactttgcattttatagattaacttaactttcagttccagtaggacaaaaccgtgtgtcttttgtaatctgtgatctaacttcgtgtgctttctatagtcatgattcatgctttaaaccctacccctggacttcattgtgattcagttatttgaaaaatgacacgagagcagcaatcagtttctctatgaaaatttggctttcttcctcctattatgctttatatttagagttttaatttagtttgaggttccatggtaaatatcatgtttaaataagatacttttgttaatgctgtattcactgtccaaaatcgggtatatagaaatttttcatccctaaaccttaaaaatagttaatgaatacttaaaccaaataagttgatagtcgacatggtttagtgtctaaacctgataaaagtactataaaggactcagtacacatataaacagtacatacctgcttttgttacatgtgcatctatcatgttcaattagatatccatgcttacatttaactgattgggactttcatcaaacatgatcaaaccagactattgcccatgtttatctatgtaatatccggtagtattatatatttattacatttcttatctatgattttcacagattctggtgtcttgttttgttaagacctcacattttgaagaatatctgtgtgttaaggtatgacaacttccatatttgtccagaatatctgccgtgagataagcatctcataaactataggatttctttctatttagtattactgttcaaggatttagctgatttttcatccattgaattttgaaaaataggaagctatactgttagatcttcttagagttattggccatcaccgagcccgacttgccacaccggtccgt

SEQ ID NO: 3990 - DNA, 1118 bp, Glycine max
acggactggtgtggcaagtcgggctcggtgatggccaataactctaagaagatccaacagtacagcttcctatttttcaaaattcaatagatgaaaaatcagctaaatccttgatcaataatactaaatagaaagaaatattatagtttatgagatgccttgtctcacagcagatattctagataaatatggaagttgtcataccttaacacacagatattcttcaaaatgtgaggtcttaacaaaacacgacaccagaatctgtgaaaatcatagataagaaatgtaataaatatataatactgctggatattacatagataaacgtggcaatagtctggtttgatgaaagttccaatcagttaaatgtaagcatggaaatctaattgaacacgatagatgcacatgtaacaaaagcaggtatgtactgagtcccttatagtacttttattaggtttagacactaaaccatgtagactatcaacttatttgttttaagtattcgttaactatttttaaggtttagggatgaaaattttctaaaaaccctattttggacagtgaatacagcattaacaaaagtatcctaagtatttaaacatgatatttaccatgaaacctcaaactaaattaaaactgatctaaatataaagcataaatagagaaactgattgctgctctcttatcatttttcaaataagtgaatcacaatgaagtccaggggtagcgtttaaagcatgaatcatgactatagaaagacacatctggaactgaaagccaagttaaatcacagattaaaaaagacacatctggaactgaaagccaagttaatctataaaatgtaaagtacagaatgaattcttcatcgataaattgtttatggcatatgatgtactgtagctaactatttatataatagaggaatatagaataaaattgtatttaagatccccgtcaattagcacagaatcattggtttgcaagattaaatacttcatactaaccaaaagtgcctgattttcaggatttatgttgtccaaaaacactctcctgtgcaacctctgctgctcaacttgaggatttttggctaagactttcctcatgtcagcaacaatgtt

SEQ ID NO: 3991 - DNA, 1098 bp, Glycine max
ttagcccccggaggaaaacactgtccatcccatcggcgatcgatttgatcggagactcaactggtgcggccaattcaatttcaggctcgttttctatttcactgtatcgttctctttcttctccaaatctcgtttcgtgtaattgatcgtatttatcttgcaattgcttcaatttcataagtcaacgatgcaagtttgtgaagtacgaagttgaatttgagttctgataaggaaaaggaactccattattcatttatttatcggcttaattggttccagaaagaagcaagatgataaaagcagtgctggtgttgaacacgcaggggaagcctcgtctcgccaaattctacgaatttcaggtcccttgccgtccacatttccatttatcgttctattgacgcaattttcacacagtttttttttttttttttgtggtggtgtggtagatcagtctgtggagaagcagcatgaagctattcgcaatgtgttttcaggtttatctcactctcattgattttttttttctttcaattttgctttctttttttctcagtattgtgtcttttgcagtcttatgcagtagacctgaacatgtcagcaattttgtggatgccgagtccttctttggcccggtatttcgtccttccgttttttctacttcctgtaattttgttatgttgaagtcatgatttgtttatcctaattatcattagttatatgttgaaattaaaaaaataaattgagattagggctttttctttgcattttttgtcggaatggtattacttaaaaaagattgtggtaagtatgaatttgtattggcatacggtggtggcaagtgctggagctagaactgaattactataaagtttgaaggactgccttgatcataattgtgagtgtgcttttagtttagaagtgaagactctctgttaatttcatatttcaagtaagctagtgtaaagtgtttttaacttgatagccaacttgtgttgtagtgtgctcttttgagcaattctttggcttgttcgttgtaatactgttatctcatcttttcttatccgaggaaagtaagtgtgaattcatttgttgtattct

SEQ ID NO: 3992 - DNA, 879 bp, Glycine max
tgttttcgcccagcttgcatgcctgcagaagagattgaatactagaaggcaatttaaattcatcaattgggttagcatgcaacatctgacgttgagaaaacaataaatagaggggttgtctcgcacaaagcaccctcctcacctccctttttgttgctaaataaagctgtttgccctcaagtgtttcactctttttgttttctctcttttccctctcaagtgtttcactctttttctttcctctcttttccttctcaagtgtttcactcttcttcctctcaagtgtctcactctttttcttttctctcatttttatctgatcctcacaaacctcttgaggagataacggtttgagaacaatcttcttgtcagcttgctggaaagagattttgttggtgaagccatcatgcactgccttggtatcatactgccacggtcttcctaacagcacatgggtcgcttccattgggaccacatcacacagcaccttgtcattatatcgcccaatggtgagacacacctcaacctgttgagtcacttttatctcttcatcttcactaagccactgaagtttgtatggtctaggatggggcttagtttccaaattcagtttggtcactaatgtggaacttgcaacattggtacagcttcctccatcaacaattaaagagcatagcttaccattaattacacatctggtgtggaaaatattttctctttgattgtcatccagtggctgcatttgatttcccaacagccttctcaccatcaacatatcaccctgcatagcttcctcctcatactcttcttcttccacttcttcttcactgatttcagactcactagtgatttctccatcagccttcatgatcatggtcc

SEQ ID NO: 3993 - DNA, 1126 bp, Glycine max
agcttgcatgcctgcaggaagattgagatcaaaagatttgtaactaggccagaaaccagtagtcagaactgtaactgtcaagtctatgccagggtctgcattgggattattgcttaaatactcctcaaagctagtttgattctcctttgccagtgtcaaatctgtaacctggtagcaaagcaaaagcatttaaattttcttttatcaactcaccaaaaaagttgaatatagcatatcagcttctgtttacgaagattagaaatggctgaccattccttccatctttgaggtaaactgtccaccacattgttgcttcaattttgtcaaaatacttcgctcatgatcatcattggcactcttgtcaaagagaagccttcgagcaagcttcttcctgaaagcaaccaagcaagaagtaaacatgttacaatgtcatttagataaattgataaaaggtctagaggcataaaagtaaatacaaaaataaaagaaattttctttttgaaataactgcactccattttatctcttcatttccgtattttaccccaccattatcaatttcattttagctacccattcatctcgatttttaagcttttccaaaaatatttatcccactttctagtaaacatgaattaaaggaccaattctccctatcgcttaaagtgttaggtaaagaccaaatattagttttatatcttgtaacatgccagcataagtaagcattttcggcttgaaacatgggcaatgccaagattcaactagagcaatagggataccaaggattgactcctaaccatttgatcatacaggactctgatattataccaaggaccaactctcccaaaataatgaaggcccattattggtattgtacctctaaaactaaggaaaacacatgcagcagagcacatttaattgtcagaaacaaccaaggattagtggaagtaatttttacaacacagtggaagataaagattgaagcaccagccaagcaatataaattcctttttcggtaagcatatccaacctagtattcatcatacaaattttcctcctcttttatcttacctataaaattcagcaaacaagtctttgtcactaatataggcaagcagcttgacca

SEQ ID NO: 3994 - DNA, 1109 bp, Glycine max
aaccatttaactatgaaaatagcacaaaactggaaacatttaaacaggtggtaagcagaataagtccagggttttccttatataggaacaggtgtagaccaatctcacacaataacccacttgctcacttcttttgtacccaaataccaatacaatttataagaatttatattcattaaaaaaaaacactaaattgacaataattaaaatgtagatagctttttgtaatcattataagtaatttttaataatttattttattcttattgacaaaatattgaaacattcacaagtcaaagtttcataaactaaactcatcttgcttctttttacctaacatatattgcttgttagcttacacaacataaatgattatgtttatacacacaaacacatatagggatttgctaacatacaccaacttgtttattagttggagtacgtgtccaagctacaccgtcgatgtattttaagataatctctagttataacttgctaactcactcccaactaaaaaacaactaaacaagtatgtgtacattagcaatccccacaagcacttgctatcgtatacacacttttttttagttggagtacgttagcaagctacactattggtgtattttaaactctagttatgacttgctaagtactccaactaaaaatgagtatgtgtacattagcaaatccatctctctctctctctctctctctctctctctctctctatatatatatatatatatatatatatattacaactttaatcaataagtcagggaaagttttgatactcagacatccagataaaacaaataaggaataaaattgggtatacagtcactattcagacctacggatttggatatggatgattaactttagaaaacagctgggggcataaggtgaaaagatgtcaatgattcaaactaggatatgaatttgaacgcaggaatttttattttgttaaaaccccccaacccatgcctgccttactgacttccctacttacagaaaataagcaaatcctcctgaaatgatgcaacttatccatttacacaattgttgactaacatgagtagagtgcactacccggtatccatttacgt

SEQ ID NO: 3995 - DNA, 1134 bp, Glycine max
aaccatttaactatgaaaatagcacaagacagaaaacatttaaacaggtggtaggcagaataagttcagggttttccttatagaggaacaggtgtagaccaatctcacacataggcagaataagtgcagggttttccttatataggaacaggtgtagaccaatctcacacaataacccacttgctcacttattttgtacccaaataccaatacaatttataagaatttatatttattcaaagaaaaaaaaaactaaattgacaataattaaaatgtagatagctctttgatcattataagtattttttaataatttattttattcttattgacaaaatattgaaacattcacaagtcacagtttcataaactaaattaatcttgcttctttttacctaacatatattgcttgttagctaaaacaacatagatgcttatgtttatatatatatatatatatatagggatttgctaacgtacaccaagttgttttttagttggagtacgttagcaagctacaacatcaatgtattttaagataatctctagttataacttgctaacgcactccaactaaagtaaacaagtatgtgtacattagcaatccccacaaacatttgctaatgtacacacatttgttttttagttggagtacgttagcaagctacaccattggtgtattttaagaaaactctagttatgacttactaatgtactccaacttccaactaaaaacaagtgtgtgtacattagcaaattcatatatatattacaactttaatcaataagtcaggcaaagttttgatactcaggcatccagatacaaaataaagaataaaattgggtatacaaacactattcagacgtaaggatttggatatgggtggttaactttagaaaacagctgggggcataagttgaaaagaggccaacaattcaatctaggatatgattttgaacacaagaatttgtatttttgttaaaaccccccaacccatgcctgccttactgacttccctacttccaaaaaaataagcagatcctcctgaagatttgatgcaacaacataatccatttaaacaattgttgactaacatgtaagagtagaatgcactacccggtatccatttacat

SEQ ID NO: 3996 - DNA, 1092 bp, Glycine max
agaaagtattataagttgaacaaatgaaagctattacaattatgtcattacttagcgtttgaacaattcccaaccagaacgaaagaaggtatgagtttatcatgtgaatgagatttctgttctatttctattttctaagttcttcttgcgggatgatttgggaacctaaatagggatcgtagaaaatgacaacaaattgatagaatgataatgagtgaacctgtgactgactgctatttttattctctatgcaaggtgaaaatacttgatcaagtgtctatttgaaaatatatattgtaccaagcataattttttttattcgtaggatcaactgtatgagaaaatttaaatacttttaaaccttgcccaaccaattaagaatatagccttttcagccaatttggtataaataatattaaacacaaagccaggtaggattgctctattagtgatgtttaacaaacatgatgaaaaatactacattgattcaaggtagtaaaattgaagtagcagattagttatgtaacgaacgtagctttttatgattcaactgagataaaagtcttcattcaataaataagaacaaaatattagaaccgaaaaataaaataaaaataaggggtgactagtccacgacaatattaagaaagctaataatagcacaagaacccaagcttaacaagaaaataagcttcaaaaagtcaaataaaataaggagtgactagtggaatatagaagattaagaaagctaacgtgagtaccagaactcaagtataacaaaaaaataattcaagtataacaaaataaaaatgaataatttaaatattgtaggtcaaattaacaaattggtcccgtagctcagttggttagagcgctggtcttatgagccggaggtcgcgagttcgagcctcgccgggaccaattttaaattatatttggttttggtccacatctgacacagcttaatgataaagtaggtgacgctgtaccggaaacaatcatcgttcacgcctatctgtcacgtcttgatttccaaccaaaggccgacaaccttccacgtccgaaaccttaatttaaggatcccttctctat

SEQ ID NO: 3997 - DNA, 1085 bp, Glycine max
tctttcgccagcttgctgcctgcagtaagatccaacctttatggtgggattctatgtcctggataaatctcaaaggtgctatgcctttgagtacaaaacagctgttcatgcagtactcctttttgcaagaagatggtagaaggaataggaggtggcaatactggtggttggctatcacttggtctacttggcagcttcgaaaccgaattctgttctctggagcgacttttgatggaaacaaattggttgaagacgccactttcttaatgtggacttggcttcataatttggagaaggattttactattcatttcaatcactggtccagtaacttcaaacatcattttttgcagtagtaggggtgttttttgggttcatatcacatgtattttcttcccatattttggttcctaatcagacttatgttgcctgattgaggaaccatatttatggtgtctaactctgtatttagtacctctggtacttttctaatatatatatagttttatctttgctgatcaaaaaaaaaaaagtactcatttgtctattcctgtaaagtggcaaggaaataatcagtagctttaaaatcatctgatgtgtggatgtgacacaaattacaacataaatcatgttaaggatatgaaaagtatgtactcattagtctcttccatcaactaagcaaagcaacatggaaatcatctgtagctgagagtgactattaaattgtaagatttggaggtcatggacctcatgtttatagggacagtaaaattatccaattacccaaacctttagacaatctgaaatgcacacataatatggtacaacagttctaaatggggcaggtaagtagcattcattgctcaatatgtctataattcaagaatgaagctttacatttagtgcatatttggacctcagattggcttatttttgctttaagaaaagcttatgatcaaaatgttcaataaaaaacttaaagcttctttttttttttcagtgtaaaatagtcagaaattcagaaccagattgcacttagccagttgtatataaaactatccaatggccataaagaagacagatca

SEQ ID NO: 3998 - DNA, 1380 bp, Glycine max
  misc_feature (1363)..(1363): n is a, c, g, or t
ccagacttgcatcgccttcagcaaacttgcttcattgcatgtaactttattaaaagtaacagagaactccttcatcttttggcttattccatctccatcagaagatatatcatgagctgtcattgcttctttggctaggaacaagacaaagtcatgaatttgagaagttgcggcttctaaatccgaagtcatctgcacaaattctgtaggtttctgggacgaaataatttctttttctgcatttgagccagcagcatcttcagcattaccctgctcatcacacgtagtatcagaaggcttgacatcatggggaatggcagatacagagtcctggatggaagtgcagcatgcctcttcaagagcgtgtttaatatccttcaggatcttctccatgtcagcatccttagccgtggactcaaaaactgatgatattcttgattgaagctctgctagcgacaagccagctggaacatcagattggggatcaggtgctgacaattcctcagcagaagaaacctcacttggcaatggatttggctcactattatcttgggtgttagagggaacatctttcccagcactgacctctgatagatcattgaccacaatttcatttgccatattgtttgaagtaactgaaactccactggattcatttgataaccaagccaatttctccacctccagaaagtcatccattagttccaacttcttagtggcatcagatttgctcaattcctcagtattcttttctttagggaattgggataactcagagagaaatgctgtagaccaagactcagcacaacttcccacatcatcatttccatcttcagacaaggagacgaagcttggtgcattgcttgcattttgactgtaaatgctttcatgatttatatggatgatggattgaggagatcccttctgctgattatttgtctgaacttgtgcttccaaaatttgaagtttgctcaaagttttagcaaaactactccttgaagcctgcaactcactgttacgttttgccaaagcttctttcagcatctttgtctcttcttccattgccaataaacgctctgtaagaaattcattatctttgtggaatttctgtgcattatcaagggagaacccaggcaatgtggacatgtgagaactagaaggtttgacaggagacttcctcaatcgagtttctccatattctcgaccaagactttcaacttctagcttcatttgtgcaagtgcggcaggaccaggcaactttttccgcactagaccacgtaatctttggcattctgcctctaatttagcaatttttttaacaccctccatgtgctgcttgttagcagcttctgcaggtcgactntagagaagagaccgggt

SEQ ID NO: 3999 - DNA, 1310 bp, Glycine max
acaaaaataactccggcaccttaactattgaagaattccaggaggtgatggatgacattatcttaagatatccacaagttgagcaatatctaaagcagaagcatctgcgtgattttaccactctgtggaaagatttgcaagggaatgaaagcaaggaaatagacatccaagcgtttaagctggccctttctcatgcagattcacaggtgaagagtctgccagcaactgctcaggtatacatcatttcaccagtaacttaatgctttcttatgctgatggtttttgctgtcacatatcttatacacagtaagttcttaatgtatcgatatatctaggttgctgcccaacagggtgcatatctagctaggtgctttaatcgcagggatcatactgaagagaatcctgaaggtcctcgacgatttagcggatctggacgtcataggtttctccccttccggtaaatactgcacttcatgtttcttatattatagttgtgtttcctgtctatggggtggaaattgctaaattgtctacagtatgtgaatgtaaataaaatgccattatgtagtgattgcttcaaatttgaaagcagaagttgataagcaacattgctgtggcacacaagttaagatattagatgtccaattatgcaaagtgtgcactctttgctctatgccactttttgagatgaagcattttgtttctatttgaaaccacattcctatgttggactttaaggtctgttacatatgagttatgactatacttgacctattgctcaactgttcaagcaaaatataacaaatgtgtttttctttaaacatctgtgaaaggataaaacattatatttttgggtgaatccagggtattccctagccaattgtcaaacactaataacttctccaaacaaatattctttcatacatacgaacttggaaatcaaacccctgatcatatgtttatgggacatagttatttgtcaaccctatcatattatgttggtaaaatatttgaccaaaactaaccctttccttgattaaatatatatattttataataagatgtgaaaaggacatctaaccaaaagataaggggcatcacatataatggctatgattcaatattaaacactaattgggataaaagatggtttagattaccatttgggttagtttttttgtctaatcaaagacataatataataggtaattatgtttttatgcccttagctttatccctgacgaattgtacctgttaacaaaaggtataggcatttggggcaatttgctccactgggtggggagcaggca

SEQ ID NO: 4000 - DNA, 1789 bp, Glycine max
  misc_feature (1707)..(1707): n is a, c, g, or t
  misc_feature (1720)..(1720): n is a, c, g, or t
cttgcctgcctgtagggacagaatctaagcaagtgataaaaattagaaggatcatagccatcatatattcacatttcaggttgcctttttcttttctgtttacacttgaggaggggcagagtagggtgaatgagtcaaaggttagtaatacatacttgtttatggcaaacatcttttcctcttgttgctccagcaaagaaagaccctcttcaaattttcctaggtgaatgtatgctttaagcatcattgagcatcgccatattttgaagtagaaaccttttgagagttgtgaattatccagattcgtgacttgcaaccagcatccaaaggataggcattcttcttagcagaatcaagggtcttaccacacaactgaatcacctcctcatacctacaaagctgatatgtggagcaaaagttatccaacacagacataattggtataaattattgcacaaatagactaatgcttaattttgagatagccataattcataatttaagctttagtaaaattccaacatattataagaaagaggcactacccattaggagagcctatgctttcatttcaagcaatgcttcaaagtatgaacttattattaacgccttattaatatgttgtaatgctctctttgcattagaggttgttcttctttgcaaaagctgaacaaaatgattgatgagatctgatactttctgtcatatccattaaaaaaactaatcagttcagaaagtggggcggaagaccttcacatcaacccacttataaaattcaaaaaattctgaaaaaactaatcagttcagaaagtgcggggggggggggagctttattattatgctcagcacttaggtttcaaccaattcttccctttaagcaaactttgctccaagcaatttgcaaaactcttccttccttttccaaattcttcccttcaaaacttaaacaaacttcaattactctccttttgttgttgccacaagatctgcactagaatttataggacatgcacaggatctaacaatgcccctagtgtttattaaatgcctaaatagaaactcaagcctttcttcaagatcttgagtaagagactccactttctccaattggttttgcagcttattcatgctttcaaatttacttgtctcggcaaaaacacaccctcatgacacaccgtcatgacgaaaaaaagcatacctctcttcaatcctaagtatgtttgttttccaaatgtcctcatttttcacaacattctaaaatatgcccaagaaattacaagaagcatttgcttcaaaatgaagaagggaacaaaaaatatagaaaaagaaaaatagtacaagtggaaatccactattgaattggtgtgactaacgcttctgctccatctttgctttaagaaaaaaaaaagaatcatcataaatctcaaatgtacacaatcataccaaatttattgttcaccaggaaacacagcagaaagctaccatttgaataacagtctcaatatgaggagaaatagacagcggagtcactgcgacctattccaccagatcacatgcaataatcggtcagaacgagggaaaattgctagcaccggaagataccggcatagtagcatgcaccaatatggaaaataaaaatgttaatcgaaaagacactattccaacttacatatccactttcaagtgctctgtaatccagatcttcgnctactttcttctnctactgattgtcccagaaactgatataccagaagagtatagctaagttcacttctacaaacaatttaaa

SEQ ID NO: 4001 - DNA, 994 bp, Glycine max
tgctacgccagcttgcatgcctgtagttcttacttcctgtgcaagggaacaccagcaacacaatagccactgtatgcaatctgtgactgctggcttcccacaacaaagtttatttggtggaaaattaaattttcccctcatttgaatcctccaatagccaccatagagtaaaccaaacacacaaagcaacatacccaatagccccagaactactctcacaggctcattatcaatattgatggtaaccgtattcaagatccaaaagggagccacacagaagaggaggaaagttgcaatgtggacatacttgttaccaaaatgaagtttctccaaattccttccaacgacacaaaaactacaaaagagagtgagacatgccacagaaagattgtccctaagatcaaatagtccccctctccattgaggtgtgtactcaacaagactgatcatttcttgatgcaaaagcagtatgattctgtgcttcttcatcagtttcatactcttttcctatagggcttgcaatgcagttaactcctgcaagtgctggagcagcaattgcaatggagatgcatataccaaccccaacaacaggtctttcagatctattgaaaccccatttaaggccacaaagtgcatactgagaaaagcaattaacatggagtaacacaactactaccatcatatgtaccctttcatgaggcttgcaagtgccattcttgcagtatatttttcttaggaatatgatgcccttaggcttccacctacaaagaagtacaagatggtggaaccgctttggatgttggtatagacacatgagagtaaatagagcattgagaaattgattgttgacctcaaaccatgagtccctttgtgactgcttattaagtattttgcttaagattcctgtcatgacaagaaaaagaattgctcctgaaacagcaacacaaattatcctttaagaatggccatgttcaaaggattcttaatccattat

SEQ ID NO: 4002 - DNA, 1318 bp, Glycine max
aagtgtgatagaactaattaactgagtaaaatcttgaactttgggaggattcaatgataatggagaaaataaattgttattataaagaaatccaaacttggtatccaaaataacattcctttaatttattcaacaatagtaaatatagataatttatgatcaatgttcaatgataagcatatgaaattcaatattccagctaagtgtagtatatcttgttttatcccttaattaatttttttacttatccaagtaataattaataataattaaagaaattcatcattgcctttaggttagagatgcatatagcccctcatcatatccttgatgtcccattaattttcaaagctaggtctcaatgcatgtttcatgtagatagtttacactcaaaaacatgttagtagaactatataagctagaaactttgctgaaattatacttgaaaatgagtttataaccaaggatcacattttttatttcacatgaaatgacatctaaaagaaaaaaaaaaaccctatttgaacaatataattagtgtcattccttacaacttctaaagtgttaattttgatttgattaagaaggatgtatccgcgcgcgtgtacatcctatctaaaactgtattacaacaacctttcaactcatgatgattagtaatccagttacgaggttcaaaattatacattttatgttaagtactctcgaataacgcgttgcacaattttacattaattatatgaatgatgaatgcagtgccctcgccttcaaccaggaagtactagtgcaatgagtctactactatatccatggtttaagtaggaattaaacaccctcatcatacaaatccattagatatagattatcaattaaggtttcaaccgtgcatagatctcctgctagctagacctaggtttaatttatagaatggaaaatagaaggatttcataagatacaacattaatatagaaacttggtattaaataattaggttgaagtacacgctattgcaataacattattgtatgttacatataggaataatatataggccattgttttcctcaatgatttgaaagtaaaataataaagctaacacttaaaattaaattaattctctggcatagcttgtttaaggacacagaaattgaaaacgcaattttatggatcccaatgaaatccgatctcatcaccttccctgagatctcttcttctgacgaaatctggttccactttccaataagacatagctcttggatgaaaccatcgcttagaacgaagtgtgcatgattttggtgtcatgtcccaactctactgg

SEQ ID NO: 4003 - DNA, 1110 bp, Glycine max
atctactccaacagcagcaaaactcctgaaaaattgaattcacttgtgagattaattcaaattttcaaattaaaaatataaaaacaaaaaaacaatgaataaggttctattagaagcttaaatttgatttaggtccatgtttgaatagatttccaagtaatatttatgagttactgatttcaaatatcctttcagcatataatattctaatattgaaaatgtgaagcacatggcttcaagctttgattatcctttattacagcaactttttccagacaaattagctaataagtaccccatttatataactaggaacatttctcgatttaaataactttccccaaatggacgtattttttgtacagtagccctatatctgcatgcctgttttgttagttatatttatctaaaacatactttcaggaattgaattgacttctaaaactttcttgtaatttggtgtaaaattaatcaaattactaattgaaagtgcagcttctatatacattgagttggactacaagaaaacatgtacttcagggctaaatgcaggtggtgtgcacattataggatagatgcaggtttgtgtctagattcaaatttgatgtgacttgtatttaaaaataatttctttgatgatgcatcgttattgtgtacctgaagattccaagaataggaagccccttttgcacagccactcttctcttcatgaggagcacagctgctgcaccatcactaatttggctagcattccctgaaattaaaaaagaaagataaaaaacatacatattcacaaggtagaagattgtcacccagagtaacaaaattaatgaaaaagatttctttagtacctgctgtcgtggttccatctttctggaatgcaggcttcagctttgccaaatctgctaaatttgtgtttggccggataccatcatcgacagaaacaataattttcttctccactccagttttagggtccacaaactttgtaaacaaatcattagcaggataacattattaatactacagggaaattcattttggtagttggcacttacctttgtagaaactggaatgatttcttctttgaacttgccagctgctgttgca

SEQ ID NO: 4004 - DNA, 1130 bp, Glycine max
agacacttcagttctttcaaatttcttagagattgcttgctatgctcaatggcacatgccgagatcaatccatcgatactaaccatgtgtttgtttgcctctacgtccaaatgaaatgcttcaattttttaataaaaacaaacgtgaaatgaaatagcttctacttagttagatatagaaagtgcttttttttttattcagccgcttagacatgtgcttcttcaatcttaaagtctcagcttttttcagttatttttcttcttctctttttagtcgatacggactgttgtgatataacctaataaaaacgataatatttccctgagagcatataagttactaaaggttgaatttgtaaaaagaaagttctaaacttttaaaattagaataattccaaaatgattaatattttaaaaccaatgaagaaaaataaaagttagttttcatgtttatgattgggtgaatgaagttgtaattttgagtaggaaactatagaatttagaagcattatgttggttgctttgttatgcagagaattactgagggacagaacaatgtggtaattactgataggatgtgggctaggcttctatcttcaacaaatttgtctagctttacgattgctaagactgtctctgaagaaaaaaggcaagaagaagcaaacggtcatgtccctgagtaaaggcattgttcaaataaccatttggcttagaaagaagtcagcaacatttttcatcctgctatatatgtacatgttaattgtattcattttatcttatatatattagaagttttgtttgtcctagcaatctggctttgacctttgtcacaatttacctatatgacaaagtttttgtgtagcagtacattaaaatatgtagacttaccatatattgtttacaactatatctattgattgttaacactttttcacttcgtgcatgttaattctgcaaaagtattagttatattatgttgttatcttactcacatttaatttccactgcttataagtttgctttaatcaacgttctacacatgaaattttagttatgtgccaaccttttttgttttattattattattattataatatgatgtatgtgcttactgttacttttctttcacta

SEQ ID NO: 4005 - DNA, 966 bp, Glycine max
aataggcttagcgcagcaggcgcgcttagcctaaatccacaattttacaaacagagagagatttcagcgaagcgcgatagggtgcgcttagctaacctctaaaaagacaacatgggcctagcgcagcaggtgcgctaagcctaattcagcaaaatagaaaatagagacaaaattgcgcttagcctaacagccaggcttagcgctgaacaaaattttgaaaaatttcaaagtgtttgatacatctccctcgcttagcgcacaggcacgcttagcgagttcaacattgatacgcaacagaagggatgaacgcgcttagcacgacagggtcgggcttagcgcgatcatctagaatttgaaatattcttcaaatgcgatgaactggctaagcgcagcaagcgcgcttagcatgttcatcgcgatttccaaaaatacacaggggttttcaccccttttttcaacaaaggcccctaatgggccataaaatcctaacctaaataactacattgttctataatggaaccttaagcctagtagcactacctaacaacagtacaatcctaaaaacataaatctttaatcctaaagtttgcaactttaaaggaaaatgagaataaagtagaaaatgcttacttggattgatgtatgaaatgcacgaagaagcagaaattgcaaaggaaatgcagggacttgatgtgcagcacaacacaacagaagatgggcacaatgcacaaaagtgtgtggaggaaatgctctttagtgtaaatggtaactgcctatggcagttctatttcattttagcagtttcgtgttgcgcgcttagcacatagccgcgcttagcgtgacaacatgacgtttgggttttaaggcctaagcacttagcgccacctctcgcgctaagcgtaattcacatattttaaattctagagaggtttttaggcttagcgtgaggatatgcacttagcgctt

SEQ ID NO: 4006 - DNA, 1161 bp, Glycine max
cgaaccctcctctgttatagatatatgagaggctctagccctgtcatgtaaatcggcatgaacatcactgtcatgcttcttttgatcacgtatctcatcaaaaggcatttttcgcttatttgctgcctctgaccttttatcttcctcaatttcaacaggtttattactgtttgcaaccagaaaccctctcccgtttaaattcaaagaagcgttgtcttctttggcctttgaaaggtcactaaagaagttctcctcaggctttggggaatcagttcttcgagtcccagtaatagattcaggcttctgaggaacgttatcaaacatgctcttaaagtcatccaccattttgccacccctaccaacttcttcagccctagtatctgaggagctaccattcttacccttgggtttggctgatgagcctccaaaagataaacccaagctgagctcaagcccactctcatcctccatattgtaatctgagcctatcaaaattcaaaactgatcaaactacttgcttgccttatcttccatgctactccctactcattagcccaccttttcaccataagtaaccatcctcagatatctgcaataagtttgcagtcaaacaaagcaagccattatcagtggcataacacaggtttaccgaatatctgtacctaagtttgaagtcaaacaaggcaaggcattatctggcatatcacaagtttacggaatgaaaaatattaacaaaatcatggttttcacttcggataaaacagatacagtttcttaagtattgtttgtgctgttcttcaatcagaatccaaatttcatctcagtaattcatgtaataaaaagtttacattaaaggattatgcggattatcaaggtgaaattccaattctgattggagaaaaacaaaacaacacctaaaggattgtatctaagttttcttctctcactaaaggtaagagacataaaaacaaagaactcgttcctgtctatattatcaaggatgggacagatttcattaatataaaattccatgtggaagcttaagactcccttgaaccatcatacaccatctagagtatgttatagtcaaacaaacaacaaattagtaattaaaaaaaaatccagcaaaaccaaacactttcaaataaaacttcaaaatgt

SEQ ID NO: 4007 - DNA, 1097 bp, Glycine max
aattacctgaattgtagtatgctggcttttccttttgtttaccttggcatacccataggggccaacccgaggcgatgtcaaatgtgggatcccattatccacaaatgtgagagaaaattggcaaaatggaaacaaagacacatatcctttggggggagagtgacactaatacagtcagtgctaacatcaattcctatttatttcttttcttttttcagggtgcttcaattagtggtggataagctagtaaaattacaacgtagatttttgtggcaggaggacctgaccaaaacaagattgcatggattaggtgacagacagtgtatttaccaaaagaaaaggagggtctgggcctcaaggacatcaacacttttaatattgctcttctcgacaaatggaagtgacatcttttacagcaccaaggggaattatgggctagagtattggagtccaaatatggcggatggaggaatatggatgaagcaggtagggtaggccctgaatcaatttggtggagggatttaaaaagggctcttcatcactcacatcagggtagggttatccaagatggattaaaatggaaggtaggagggggggatagaatcaaattttgggaggataggtggatctgtcgggaggaatcattagcagaaaaatatcctagactatatttggtttcatcacagcagaaccagcttattagacagttgggtactcacaaggacaatggttgggagtggaattttatatggagaagaccgctgtttgatattgaaattgattcggctgttagtttcctaagagaggttaaaggcaagtctatacagcaacagggatctgatggatgggagtggttaggagaaccatcaggtacatactctacacacagtgcttataacatgatatgggaggagatagcagatgggagccaggaggaatgttttgaggagtaatggaaaatcaagatctcaagcaaaattgcgattttcgcatggagattatttagggacagactgccaacaagaaaaaacttgcagaggagacaagtgcagatttcagacatggtcatgccctttcagacaggcatgcaagctgga

SEQ ID NO: 4008 - DNA, 1066 bp, Glycine max
agtctcgctaatgggagtgaaacctcagtttctactttctgaagtgtagtagattgcatgctggcatgagcacatgcttatgaattattgatagatactgttcaataagggcatcacatacatgaaaacaactacacttgtgacctttttctcttagtcttgaaaaacatcgttgaaaacaaattaaggaaatgctacctatgtgaaattttgatcaagttatgtgtgcaactgtgtatagttgtggatcgtttattctttcaagaagcctagattcacctacatgcatctcaagcatcaatattgagttggatcaaatggcaaagttgatttcttctttagcttgtttttaaatggatttatgatgaaggggccacatttctggttcgcatgtcgacctcatgcttttttctttcttgcaaaatatttgattggtgaactggttcaaatgattcacgaggcagtgtaatttactctaataagttttagtagctcaatgtttgtgggccattaggttcaatgtagggccaggattgtggtggaagagagctgttgagaaatgttgcagcaggaggaagaggatggaagaaaattttgaaatttgaaggagtcacgttgccttgccaaaaacatgatagacaagtagtgtaccgttgcagtagaaattacctgaaatgctatgtgtccgttgcattcttcccctacataaggattgcttcctccactctagtttttcaatttcatttcaattctatttttgagttctttgcaaaaataaaaacctgcatcccttttttggggtgtatgggttgatggaagtgagtgaaagtgatagatacggtagatgacgtgatgaaattggatgcttgaataatagatcgaagaatccttttccttacaccctagttaggccctactatttatgctctcaattccattcctcaatttccagaaatctatgtctaaagtcatgtctgatgtctgtcactatatattagttaattcatatatgtttatgaatattgcattgaccctcgttatatatggatcaatcaagcccattgct

SEQ ID NO: 4009 - DNA, 1044 bp, Glycine max
ggaaaaaaggcacaacataaggtcttgtgcacaaagagaacacttacacatttctaacgatggccatgattcccccgcttctatgatctttgaatgtcagttagtttcagcttcaacttcatgtttccagcttgaactacaatttctcctttggatgaatccacttttaaaacagtcacctgtttcccgagggaagagacatgtaccatatcaccaaccttgggaggcccagatttatctgcaacatcaataaggtgaatgacaactgcatcaatattcctacgatattattcctagttacaagactagacagcacaactttcacgtgcactatgctatcaccaggtaaaaaaaaaggctaaaatatatttttgatccctaataaatatcctattttgcatttgctccctaataaacaatgagcctctaataaaacatcaattttgtttttgttccttgacacttatttttagcccctaataaattagcaaattttgtgtttgctccatgataagtatttctcatttgttattaatacagactaaaacaaaatttgctaatttattaagaagtaaacacaaaattctctaattcattagggattaaaacaaaatattaaggataaaaaagaaaagtgttattttattagggactcaacgcaaagcaaaatttttttagggaacaaacccaaaaattgggtatttattagggattaaaaatatatttaagcaaaaaaaaaagtagagctgtacacttaatccacatgcaagaaattgaacacgaaagcatattatctcaacactgtttggtttccttttatttccctcatgtttcattatctttgcatatacctgatcttgatcgattaaaaactttaacagaagatgcacttttatcagcaatagtgggttctttgttctctgcaacagtttggcttttgttggttgctgataaattagagctgctaatggttttattattctgtgaaggtagcttagctgatgcatccaattccctcactttcttgtgaaggatggatcttgc

SEQ ID NO: 4010 - DNA, 1010 bp, Glycine max
gccagcttgcatgcctgcagatacaccctctggcagaaagagcttccacctcagccatggcagcattaaattgattttgtagttctacattcttgctagaaatatcatgtagttcaacacggcaattagcaagttcttcagtaagttgttgattcttctcattaacttgattatgagaagcacggagctgagatatttcatcaaccaactggcgacgctgatcatcaaactccagttgttcagctagttgagtgttaaatatatttttcattaagtttgcaatgaacaattcttctttgagactctgaaatgcttctgaaatgtcattgtctgatagaactgaactactggctaaaggattcaaatcagagactgctcctcttgcctcgagcagaaaccgacactcttcttcattaagcccctttataatttcacccagctgcaagagattaattgagtttgcatcataaacataggagacatccaatggtctggctggatcaaactcattagttccccttggcagctcgtgagaggagagtaattcaattgacttgcctagttgctcagcttcatgagatgcctcctcaactctagtcttgtccaaagcaattcctgaaagatactggtcactctcaccaacctcagacaaaggaagctgcttttgaccatcaatcacagcatcagtgctttgataagatttcttcatgtccaaaccatcagcttcctgcattgaccctacccagcaacaaatgagaatataaattataaatcaaatccatgtattagttttcccaacctgcccaactaatatccaaatacctaaacataaaggtataatataatattaaattgaaggtgtgtgtacggagagagagagagagagagggcacaacctaaatctgttacctgatcttcgcttgtttgcatcacagatgtattgggtatatcctcagataaaagcaacaactcttccctcttttgacactttctttcatctgtaacactct

SEQ ID NO: 4011 - DNA, 1158 bp, Glycine max
aatcccttgatacagtattgtaagacacaacatctggctccggtacggagttttgaattcccttgagcacttcttctgctttccaacactcatcctctcggacatacagatccatcaagcaattgtaggtgaaaagatttggctgcaatccacattcgtgaatgaaatgcagcatttcacgggccttcgaaaacatcttgtttcgggaaaacatcgaaagcatggaattaatgacaaccaaatccggtttgtatccatacttttgaagttgatcaaatgccctttccattcccctaaggtgtctgcacttgtggtttgataggacaagggttctcaaaagtatccagctaggaaagacctgaccatcataaatttctttctcaaccttctctatccccctgacattcccagccttggaataacaatggagcaacagtgagtacgaagtttcgttgggcttaaagcccttggtctgcatgtcctgaatgacagattctgctgctttccaatcacctcgatgagccagggcatttagaagagcattataagttgttacacatggagtaaagcctgatttaaccatttccccatacatttttgcagaatcaacttcagatccgcaccgagcatatgaactaatcaatgtattgaatgtgtctttgtcaggctcaaatccacagtttttcatttccctcaagaccttgttaacataattgtgcttaccctcctcactacatacagcaagcatggtgttccacgtagcgcgattaggagcacatccattcaatttcatctcacagagaaccttaataacatcttccgttcttgacttcttgcctagcatggcaagaacagagttgtaagtgtatacattgggagcacaacccaagtccttcatcttgctgaacaaccttaatgcgtcatcctcccttcctgccttaccataggcatcgattacagtggtataagtaattgcatttggcataacccctttgcttgtcattgtatctatgacagccatcccttcgtcgagaaacccagcccttacataagttgccgcgagctcattgtaagtaatagaatcaggagggcaattattatcctccatttctttcaagatgctcaaggcctcggtgtaaattccagcctttccaaaaa

SEQ ID NO: 4012 - DNA, 921 bp, Glycine max
acaaacatttctggttaacggtgtttgtacctaaatcactttcaccatgaatattattctcagaaggagactgctttaatgaggtcctcaaacttttcctgctgcttctgattgttggtgaaaggctggaaggacggaatttgaggatgggggatgttttgcatttaaccatgccgccagcagggctgtcaccattcattgcagcactaggagaaccaatagatccattaggggctgaaaaaccagcaaaacctccatttgagttgtggagaactacagcatgatcctcaacaccttcctcatcaatctccatctcctcatcaccatcttcatcaacatgaggtagtgataatgggtgattgagggcaggcttcaataaaatcaaacttcttctgatcaaagctgctgaatgaccccgacttccatcacttggactgtaaccattttctttaattcgatgcagttcatcctgtttgatttcttagttataagttatttgaaaaaaaaatatgtactggccaggtataaagaaaggattgatcatggtagaagagaaattaccctgagttggcatatcacgtctcgtaattgattcacatcatcgtgcattacttcattgacaactgctttattcttgatagcctttacacgttgtgcaaatctcaatgtactaagagtttcactcttacaactgcaatgttaagtcatgagaaataatccagcatacattaagagccagaagaagtcaaactcactaatggttgatatctaccttagtgctggggaaatagcacaaaccaatgctaattttgcatttccgccaagagactcctgcaataaaaatgtcaacctggagtctctatatggtatatgtcgcagctttcctgtctgagaaacttcagctagaatgtttatcaaatt

SEQ ID NO: 4013 - DNA, 1128 bp, Glycine max
tgaataagttcatttcggtggttatcaagttggatgttgacatagtcttcagtgtcgtcaatatactccctaacctgcaaaccagcaaccataaagaagtaagacccttaccacttctaaagaacaataaattaaaacagcattcaaaatttcagtcaaattatcacaatatttggcattccagaaacaataaccaaaatcagctgacatttcaacaacacaaatgctccccaaagcccaatattttggtccatgaaacatatactaacttccttccccctcaacattaaaattatagactttctaccatttagttataatcaagaaatgaaaaccaacatccctacgcagagaattgcagttcttgtattgttatgttagttgttaaataaaaaatgtcacccataattgaacaaaaggaccacataagtatcacaagtcacaacaaagtttatgtggttgagtcacgtatgcaaatgaaatatatgaaatttatcatctaaaagcacaagagtgtgatataaattagatagacgatagaatccaaatagaaaatgacagtttcaatcttcaaaatttgacagacacattatttgaccagaatatggtgttagaatacatactgataatattttgttacgagttccatccaactgcatgaaatatgcatcaagcaacatctccaagtcctccacattgttatcatcctcataatggctggtcacaagactttcacttctgatagaaccaagttgacgaacagaacgtgaggtattaggaaagttatttgaggttgtggcacccaaatgagcctcctcaaattgttgattctgcaaccacttccttgtcaaatatagttgtgccatatcttcattgtcatctaacagatgttcaatttcatctcgcacctgtgaaagagggtcatagacttcttaagtatgatatctcaaagatgagggatgcatcatcgcatacaaggtaaaatagcctgcaataatttttcgatctataatagtgaacaaaaccctcaatctaagagcataataaatgactattgaacaatgtaacaaaggaaactcaacaattacagagttaggcaagaaataactttcatctttatcaaagact

SEQ ID NO: 4014 - DNA, 1046 bp, Glycine max
attaataacaaaattatttttagccatataaataggaaaatcacaattaaacgtactttcaaaaacagcacacagcaagatgtaaccttggatccagaagagttatcagtaagaacattcttcaactgacatcgcttggaattattttgaataagagaagatgcggcctcaacaatgcaacgtgtggatcggtagtttttgttaagcctaatctgaacccaaaaagttgtacaagtatccaatgaagacattaataaggatataatgtattcattcttctatcaaattatcaatatatatgggtgtagcataaccaattaaggctaagtatccagcattaaaacataatcagtcagaaaaagagaaacctctttgtagtttggaaaatcattgcgaaaggaaataaatccagaaatgtcagctccattgaaactgtaaatagactgtaagaaaaataagacattaggccaatggttacaaggatgatcttttaagtgcagagagagaaataaacaatataaatatccaaccatagacttatcaaacttcagaggttaagaagaaaatattcatacctgatcatcatcaccaacaattgttattctatgatgagatgcaagcatctttagaaacttgtattgcatggcactagtatcttggaactcatctataacaatagctttccatgaatcctgacattctttgaaaactaattcatagtttaaacaaacgcaagttagtccaactaacggtaacaattgaatagattttagttaattgtatatttatgaaaatgaaaattctcaccttcaggaaaatcactaagtagcttcacagaacagctgatcaagtcatgataatccagagcattacaagattttaatatgttgttgtaattcttaagaattgcggcctgattgcaatgcagaaaaaaagaatcagaagtgcgaaagcagaacaagtgttggtgtctgtgtgtgcatgcatgcgtggcaaagcctttatttatcagcttactccaatttcgttgcccattttgcgatatt

SEQ ID NO: 4015 - DNA, 1150 bp, Glycine max
ttcgcacctgctgaaatatgattctatgctgggaacctttaaggcagatgtgaaaatactagacaatgaaaccatcactgttgatggtaagtccatcaaggttgtttcaagcagggaccctcttaagcttccatgggctgagcttggaattgacattgttattgaggtaaagtccccattacttgacttatttcaaacacgatccaatattgtttacttattgaagagctcctaaaaagatcaatgagtgaatttttgttcagggaacgggagtgtttgtggatggccctggggctggcaaacacatccaagcaggtgctaagaaggttatcatcactgctccagcaaagggtgctgatattccaacttatgttgtcggagtaaatgaaggggactacactcatgagatctctaacattataaggtccgtgacaaccaaagcattgctctgtgtgtgtgtgaacgaaacattgtttttgtgccaattgattgattattcatatttcattcctatttagcggttaaattttctttttcttatatactgtttcttcaacgtgcagcaacgcttcctgcaccacaaactgtcttgctccctttgtgaagatcctggatgcagagtttggtaagcaaacactcatcaacatcatactggcagttattatttaagagagatattccagactcaaagtcacttccctttggtctatgtttccaggaattgtgaagggaaccatgacaaccacgcattcctacactggagaccaggtacaatattgatcaatcacaagttagttggaatccaaccttactttacttacaatatatgtgttcaaaggggatgtatctagtgagaatggtttttgatgtgagaatgagaagaataactattagtctttagatcttatcataaatcatcaaaattaaaatacacaagtcatcctgagagtttttagagagtcacgtcactttttttagttatatgatccatatttacttttctcatttttatataaaataacattcttactcgatataatgatttctaccaactgagaatgaataactagttatatagagctaaggaagaattgtgtatgtgtttgtgcagaggcttttggatgcttcacaccgtgacttgagaagagcc

SEQ ID NO: 4016 - DNA, 1056 bp, Glycine max
aaagaaatatgttctgcgtaagggtcgtgattcagagtatgcatggcatgttgtccaaaatcatgcagacaatgcattgtattgtgaaacacctgccagggctttttagaaagtgaatctgggcattttcttagatgcttgtgattgtcttttaacataactgaaaagaattgtatatatcccttttaacacttttcataggatccctgctcacctaacgcttttgatcttttggccataatgcattactaacaacactttcaacattgagtgcccatattaataattgacattcagtatttcccttgcttttccattaagtacctgatatcacatccttatttcctctctccgctttaattttaaataaataaatccgttgcgaaccacttggataaatgagtataaaatctggagaaactaggcttgcatgtagattactagatttctcgtttgtggggttttaaatacgtatgcgtaagtgatggcaatactgctcttaaaagtgaaggctctactgccgccacctccttcgtggagcagcacaatgcctccgcaattgctccaaaaaggaagaaatattgaattgctacttctgaatcgaggacatcaaagtcattacgatatgacaaatgttaaattaagaaatttaaagtaaaaatatttttattgggaaatacaatattatattattcattgtttttttataatttatataataaatatttttttaatttcctaattcatgtcctaaaaataatttaataagatccataagaaattagtagttttttcttaattatgaccggttagtgtaacgacacaatgattctgtttctctttattgtcgacagagctatagaaaaagctgatgagcatggctattggctattgcaaattaatgataaagcattctcactcgttatgtcactctttttgaccccattcttgctctaattggacttggattttaccaacagcgtctctttattcacagttcttggcaataattctcagtttctatgcattgcacagaacaacaaggagtggacgatt

SEQ ID NO: 4017 - DNA, 1209 bp, Glycine max
aatatttttttctgaactgagacccctgctgttatgctacgattttatgatacaatggaatattgaatgtttttcttcaaccttttcaatttttagagttttatgatcacgttttggtaggtggtgtagtaaggttttaaaaaccgaattagtcgttcaacctattgaaaggttcaattgaaattagacggttaaaccatcattaaatcgaatatgattaaaaatatattttatttttatatgcaacttttatgcctatctatatgttaattatttaaattataactatatcctagtgtatacttaatttcattaaacagcaaattacaattcaaatttatgctacagaaggctttttcatttagcgtcgtgaagctcaaattagaggatatatcatatatatgtaataactgagaaatcctatcttttgaaagtggattttcctgtaactagctgaataatttctctagatttgaatccctctcagtctaaattaaattttaatagtttgttatcttcatttataaatagatataatattattatgtataatatatacaagatttacatataatatataacagttttcaacgtattatcttattttgaaatgtaaatttaaagtatattattaattaacattacaaataaaatagttattatttaaatattttttaaagagaaatcatattattaatttgttatttggcgtgcactcaataaacgaataagattaaagtttatttttcttttatcttagtattatatttttatcctatattcgcatcttatcatattatgttatatcttgatgatgaatcaaagaaagattttattttatttttttgaaacagtaaagatttaaatgtttaagaaaagaaattcaataaaaggagaaagagttgattgtgtagtactacgtacgtacagctatggactagtatgtttttggtgaagttgtgagaatggaaagaaggaggtgacaagtaaaagagggagtgacaatggcaacggcatcaacaacgacaacaacatcaatgtcgtcaagatgcttcaaaaccgtgagatttgttcgtcacaaattctgcaatattacacctatgatccctccaaggttcccctctttcctttttttccttcatcattgtccaagtggtcgcgtggtcttcgctgtttaccagtctggtttggctgcagagcatggaagct

SEQ ID NO: 4018 - DNA, 1210 bp, Glycine max
agttgaaagtatctaaactaatactgtattaactacctaaagccaaatatgtattcattcggtgtggaatattgtatatctcagctaatttctaagggaacaatgccattgttgacataagaatctggtccctgctacagttatgttaggtcaagtattagttaactgatcgtgttttagtttcactaacccgcgtgtgcatcacgcgcctactgacagcgatttggccttccaatgctcatttaaaaattgaaatgtcagtgcatttccttaataccaactgggtctattttattcacctaggtagtggtactacaatgtcttcaaccataatatatattaaaaaaagaaaagaaattgtcttcaatgataaacatttggactaataaatggtcctcaagtttatcacggagcacacgtttttgaattattataatcgtgtaccacatcaacaatttatgaaagaaaaatggaggattcaatgaaagctgaatgactaaaatgtcaaataggtaggaaattgatacttcgttatataatttaatagatagttaattaattattagttattaaattttttggtcaattttatggtattttgtttttactccatttgacttttcaaaaaaatttaatattataaataagtgagaggtaataataataaggttttgaaaccacaatttagaaaccaagggatttcaaccatatgatcttattatatacatccaaaacatggcatccattatagccaataccatcatacccacgaaactttagacacacaaaatgttcaagtcatgtattaattatcattcttcatcaggtactattacatttaatatatttttcttagaaaaagtaagagagagagagaaacaagtcggggacaaacaatcataaaaacaaataccagttaaatatttggaaaagagaattagaattggattcaaaattctctatttctctttatttcatttgtcaaatcatccacttgtaatgtcaaccgcgttctggtaaatccccctagccgtaccctttccaaccgttccatatataaaatgtctcaaaccccctaactttcttacatccccaataaacttataagtgcggaactgtgttagaagaagaagagctcaaagatactaacaaatcagcaaattcagaaggaaacacagattctgcaggcatgcaagtctggcgcaaaatt

SEQ ID NO: 4019 - DNA, 973 bp, Glycine max
caattaataataagtacaaacactagtggaaaaaaagtatttgcggtatttaggatatcaatagcaaagatttaccaatcatgaaaagctccaatcaatccccgggcataaattccagataaggtgttcttcatgcttgcaggaactacattcattatccaaacaggaaacttatttagtgcaacagcaaatccaccacaataagcattcatatccatcacattgcatatttctgtcttgctgacattcatcagtttccagtaatgaccaatttgttcttgccaaaagagagtgtctgaagtaaattcattctgatttatacctgttcaaaaggttaaagggttatcagactgaaaaagactactattgagcgcaccatagcaatgcttgttttaacttttaatttctagctgggtaaattatctttttagtccctaaactttttaaaatttctgtttttactttttagtccctgaacttttttccgtccttacttttaagggactaaaagtaaggatgaaaaaaaagttaagggactaaatgtaatgacgatagaaaagttcaaggactaaaaacaaaaattataaaaagtttaaggacttaaaagatagtaaaccctttcaagttgaatgattaaacaatagtagtcctcacttttggggaattgattcttacctatcccatcgaaaaataggggatggaccagcagttgtctatctatattcatatgttatcaatatgtacattgatccttataagaatgctttcattttagacaatttggagaaatgttcaagtacaagtcagtctgacaataaaatatatttattcgggaaataataacaataaaatatgtaaattttttattttttttatcatctaggcaagtcaattatgttcccacagaacttgaagtttaagaacagaactattctgcaacaaaaacaatgttagcaaagctaatttctgctat

SEQ ID NO: 4020 - DNA, 1081 bp, Glycine max
tgtcctaacttttaaatcctctatttctatgctaatttgaaattgagttctgtctgcttttgcttttgttgacattctgagttttgttacttaaatagagggatttttggtcattttataatcaagtatataaatctgcttactagtgatattctgtttaattatcttgattgtgtatctattttcattttcagtcaaatcaaattgcacttggtgctaccattagaattcttcaataaatgaattctgttcagatgtcttccaagcccaagcttatgctatactcccttcaacttgaaatttgtcactatatctagttagtgtgtctgtgggtgtaatactgcatactgttatatgaagtcatggatgcaatatagttttgaacatatgccaactactggttttcttattaaggcttattagttattagttattacaaattacaagtattgttagcagtcaaagtagtgtttctataatgatgggtttaatatcattgactcttattagcaaagatgttatactgatattgatggttctttgctttgtattaaagaacaatataaaagatattttcttttttccctatttttgatgacctttggaatgagaagtgtaacattgacattacctagtaagtccttttagcaatggggaaaaggaaagcaaaatcatcgggacaacccagtaacctagagttgcagagttcacatatgcacaattttttttgttagttgaaacaaccaacagagcagtaacttctagtgattgtgctgataaggaaaggagtgcgttattggaaggcaaagtgatgaactctgcctaatcacaccaggccaaccaattaatatcattagttgtattgctataggacttggtgcttcaaatagtgtactaagcaaagggaatgcaaatggactccattttgtgaaaggtaggatagactgcgtggctatttttcataggaaaatccgaaaaagaatgatgccaaacttgttattgtgttcattgcttgtcattgtttgcgggaataattacttgtgaaagtttaaccaaacgaatcccttctttcattcatttt

SEQ ID NO: 4021 - DNA, 1236 bp, Glycine max
atgatacggccagcttgcatgcctgcagttactgatgaagagcgctgtcggattggcaatgattgcaagaaaacattggaggtaccaaaagccgcttcctcgtcatctggaaatgaaaataaagctggaaatttgcaggatgcttcttacacctcaataaatgctttaattgaaggtgttaagtactctgaggctgatgatgttggaatgaatcttcttgcgagtgtggctgctggagagattttgaaatctgaattgttaactccgactggatctccagaaagaaacactgctgctgttgaacagtcatgcacaggcaatggtgttgttaagtcctctgaagagaatcttgtccgggatgaatgccactcaaataatggtcttgatggtgaacataagaatcagggttctgtaacaggtgatttaggggcaaatgatgaaagtgattctgattttcgagcttctgaagagaaagctgcaagagagctaaataagtgtgttaatgcatgtagtatggatttgcaacaggtttctgaaactattttagaaagcaaaggaaaattaaacaaaaaatctgtatctactgcattgggtggcctttctgaaagttctgtacaagaagctagagatggtgacagaagcaagcagctccaggaggttggtcggggagtgaatgctgatgaaattgttgatgttaaggtcagttctgttgcagaagttaaggcagaagcaactgaaaaattgtcacatatagctgtggaagtggatgtacagagtgataactgtactgctgaaggatcaactggtggtggacagacagctgctgttcttgttccgtctgattcggcaagaggaaaagatgagaatgtactccattcttctgcttatagtgttgataaggttcctgaagacttgactgaacgggagtttgaaaaagctgatgatgttgatgctgagaatcattctagtcagtctaaaaagcaaagaaatgagtgtgaaagtgatgccttgacaatgcctgaggatagaggtttatgctctattgtgactggtattgctgctgaacatgtggaggaaaatttagaaacgaaagaggttcatgaccaacctgccagagaggaacttcccaaagattcacctagtgtcctttcacaagaaatggataagcatcttgattctaaagggtcaaaattgattgccatggaagcggaggaggctgaggagtgcacctctacc

SEQ ID NO: 4022 - DNA, 1296 bp, Glycine max
ggtacccggggttatcttctaggagtcgaccctgcagcacaataacaggttacctgattattgcaaaaactgagttatcaaggaacaataatacttaaaatatcacagtggaaatatgtaaagatccttttgtttatcttcattgagattcagttcatcagtgatttttttttaggactgcatggaaagagggaaagtacacctagggataggataagtactcctccaaataagagaagtactaaacaaggagataggaaaaaataaaaacaaagcagcaaggaaatccagtctctcttgtgtatcaaaaatagaatcttcctctggaagctcttgtcacgagtataaaatacagagaaaaaggatgcataagtaactgtaaacagtaaaaaacaaaatcacaagacagcaatcaaaattaagtctcagactctcaattaagttcaagtgatttgagttgtcctcagtttctacacctatgatagagtagagacaacagtaaaacacgaatggatttataaattgctctcaagttaaccaatgtatggatgttataaattcaaccaaaatgtcttccttttgcatttctccctcaaaaagattgcaaaagtattagtttttcttcaaaagtatttctaattttatatgctataaatcatctaccttctcttaatgaatgcatacattaataaaaattgagactaacactagaaatattaatggacctgctttccgggctttcgcaatttcttccattgcgtcaatgctcattacatgaaccacatataaaggagtattcacaaaatctgctaagcgaatggcacgagcagttgcctctccttccaactacacagataacaaagtcaaatgggagaatttcctataaatcacacagacagacatttaaactttgcagtgatcacaaaatataagagaacaaaacatgtaatcaagatgataaaatactggctaaacgtggttactgagtttatcataacagatgaaagctgaacacaacaaatgtcaaactagggtggtcacaagcaagcaaaatttgatagtagcagcttaaaacagttaatttgtctaaagtacagcatctaaatccaattcattatgcagggagcctactaagttgaaaagggaaatttaaaatatgaggagtacaaatcacattcacatatgctataggttggtcagacaacgaagaagatggaaggaaacaaaaaaatgtccaatattttcattccattattctgcaaattctttactaaaagaacaatattagaaattacc

SEQ ID NO: 4023 - DNA, 1187 bp, Glycine max
ttgcatgcctgcagataaatttaagaaatagaaaagtctattataaggcatttgttttctctacatgctatctttatgaatcaacaatctcaaaagtttaagctactacagttggtggctagagtcctagcgcagaagactcaacccttggattagttctatattttgaaatcctaaagtccttaaaccaatatgttaatgcatttttttgttatcaagtttgatgggatgagtttacatacataaattttggaaataataataattgatgaaactctttctctatgttagatatccaaataggataggcttgtttgagttgtttctgtattgggcttggttctgttggttggaagttagttaccatgtgctgaagataagaaggaattggctactttttttacatacacttttaaatgggaaataagttagcagcctttgctttagtgtttatggaattgaaaagctctctggtttgctgtagtttagcattttgattgcctgcgtaatataaggaggtacaaaagaaaactatcacagttgtgtaactccagtaccagtttctgttgtaaatgtattttaaaattaaattccatttttcatattgctgtcggatgcacacagcatgatacttgtgattcctgcaaaaataatacttgaggttcttgattttacatagcatgatacttgagattcctgcaaaaataatacttgagattcttgattttaccaggattaattttgctaaactttttataggcattaaaaatcaggagttgctttgactgctgtataaatactactttagcatctatgtatgttgccagttgccatattataatggactcaatcttaattaactgtagctaactatagcactcgtacaattcctctgctttgtactacaaagttaatacagaaatcatcctttttgtcatcttgtcccaaaatgaccaacaaatgacaatttgttgtcaatatatttaacaaaattaggattctacttaaaaatgagtcctagttaccattggaaaatgagcctaattagtaccaataggatgtatcactgggagggcttgatgtatgattctgaatccagaatttttgttgtcatttggattactatatgaatgtggcactaggagggcatgactattccggaattaataaagtgtctacttattatt

SEQ ID NO: 4024 - DNA, 1012 bp, Glycine max
ggaagttggaagctaacaaggtatctttctccctgctttattattcccgtgcttctaattgattaattcttcaggctgcaatattgcagcagttgctatcttctatttctttttaatttggtcaacaagtttgctttgctgtaattagtttgtaactagaattaagcccaggatgtgtattgaaaactttatttataggagctgctactacagtcccagtagtttgcttatttcatatatatgctgaatgctgattgagatccccaaattttgctagttttatcaacttgctggaggataacctcccacttctagatgttgcaggtttagaatttgagaaaggaaagtactaagttaaaaagccttgtgtgttgatatatttttttgcatcctgggtttaacctagttagtacaataaagttttcctgatatcacttgccagttgccaccctcagttgtcctttggcattgatttatgcttgaagttctttttatgtatcccagatttgcataattagtgcaataaataattaatttcacttcattttcacttttcaggctaaacaattgtgcttgggtatagcacgtgcacttattctagagcataggcctgtgcctgtggttgccaaggctgtaaatgtactagtcacctcatactcccattcaattaaaactggtagctattttaagggactgaaaccagagaagtcatcaacttctgttgtacaaaatactggtgctgaggtatctgctatcgaaacagatgtaattggaaaatcaatcatccatgaatctacgagaagagtagacagtggatctcttaataaagcgtcaactgtttcaagtttggattctgaggatgagtcccagtctgcaaatccaaaacacagttcaaaggaagcccaagtggagggtgaagtgaataatgagatatctctgagcactggagctcacagttcttatgttatgcaatcatctcttcagtctgggcaagaggaatcccaacttactt

SEQ ID NO: 4025 - DNA, 1244 bp, Glycine max
agcttgcatgcctgcagtacccgcaagatgcaccgtgcacggaagagaaaaagaaaacaaacaaacaaataagagaagaaacaatgagtgacttaccataatatttagtatatattgtttgctttatctatatatccgctccaagatgcatgacacaatcagcccttgtggaatatctatatgcaaaaccatatttatgactttgcattaagattgcctctcaaattcaaattatgataatgtaaacttgtgtcgatcgaggctgcacgataggagaaaagttctcaagcttgaaatttctaacaaagttatccctagaaacactgcctcgataaatgctaatgtggtgaggcacgttctttaatatactgtagaacagtatcacttttcttctgtcttgatacctttgctttatcgtgctactatcttatcgccatacgtgggcgaaaactggaaaattagtggtaagagagcaataaactcaagggaaaaaaattgcgcaaatgatatcccaaatgatattgcatagtaaacaaacaaaacacaatacatgcacgcaccgttgtacaaagaaagcccaatagaacacaaaagaaacttaactcggtgcaaaaaacataaacaaaaccaatgacaagaaaaatatacaattgaagaagactaaattctaccagcctgattggatttctgttaacaacactgacgcgtgaagacagtggaacattggagagctgccatcctaacccggatatataaatctaagagtttattggtacaaatattttttggatcaataattatatgagtttaaacatgccgagagagggggagagagagagattcataaaatggaaactcattcaattattgataaaaaaaaaaagtaacagcaccaatacccttaaatttttgtggctaccatatgaattatgacccatatgagtggtcaaagttacaagagatgactcgctgaagaagatacaagccctgataaatccgtccatgaatagtaatggttactattttctgagacactcaaaggagatcttgacaaattcaagccaccgttatattccattttaacccgtgctgggagctgagtagccctagaacttgcggcaatatctccaaccaaaccttcaacactttcactttgaaaagggtaggaattagaaacagctaaagttgactcaaaaccattcaagaaaggaaactgctggaaccgccactgctccactcctcct

SEQ ID NO: 4026 - DNA, 1085 bp, Glycine max
ttgcatgcctgcagctatggacactgtgccagggagttggctgtcgaaggcagaaagcacagaagcaggcttatcaccattgttcttctgatagtgcaccaaaccttttgggaacacaaagatttcaccgttcttaatagactttgagatgagtttgttggatgtggagataaatccaacatctaattcaccgtccaacacaaacacaatctcagtggcacgagggtgtgtgtgaggtgggttaagtcccccagctttgtagtctattcttgagaaagacacccccacaagtaattggtatatatgttgcttttagggaaaattcgaagattgagttgatggaacggccccacgttccacgttccttttatttttccgttgcaatttggcccacgttccacgtgccttttattttttcccattgcaatttttgggaatttttattttatggtccatttttctttcatattaaacctttatctttacaaccaatttcagtaacaaatcacatacctattttcaagctcacttctcataacaaattggttgtaaagatatgtatgtgccacttcgcgtttgatttgtaatgacaggaggtacacttactaatatttaatttttactatttgatctgaatatgtcatttaaattaatttatatgtttagatcattgccattttaatttacatgagtatccaatgaagaggggtttggtgagagttgagagatgtaaggagataggcagatcaagagttgccatgcaatgtaattaactccaaaactcatcttctatctttcttttctccaactaaattcagtttaaacaattcaccaatcatgtttctgatttgacaatttcttattatattatttagtttaatcattattaaattatcaaattagtaatttaagctaatatttaaattgattatgacctaaagtttttacgaattcaactttcgacttaaatataatatatagtattatgcttatgagtcagtgttaagagaaattgacttttgaagattgtcatcaaataccaaatctgaacaaccttggagaatggattggcacttcgacaagtc

SEQ ID NO: 4027 - DNA, 1147 bp, Glycine max
  misc_feature (379)..(379): n is a, c, g, or t
  misc_feature (386)..(386): n is a, c, g, or t
ctcaaccaaaacacaattctctcgaggtattctatagcttgtcccgataagtaactctattagctaatatgtagtattaaataataaataagtacaggataaacttggtggttgtttctaaactaacaagcaagcttaaattacagaataaatgtgtcttcaataatccacatggtacataggatacacatgcagaagcaaaatgaaaagaaaaaacctaagcttaccttcaatccatctctgttacccttcaggacaacatcaagataacgatcaagtatttctttttccaatctgaaaaaaggggacagaggaagaatattgatttatcaactttaacttgaaaacgcattatgagggggggagagggggggggggnggaagtntttttagaaaaccagactgcatgtccaccagataaaaggaggaaaagaactgaaaaaggacatccaaaaaaattcatttaaatcttgatattcaaaacaatctagaatccagaaatatattacctaatgcgtaacaaaatgactagatctttaaattggtatacttaggtaagtaccctagtttgcaatatgtccagtttacaactacattgaaaagtttatcaatttaactataaaaaaaaggaatccgcagttattagttctcaaaaaatcaataaagttctaataggtactttcagccaaagaaaaatgtgcgaggaggtactgtaaacattctgaaaaatggacaataggcaatcacaaatatgtagccatacagatatgacattaactgtcaataaaaattacattgacatggatctagcagaattacatactaaaggattgagattagtgtcatgtgatacatgtgtggacatatatataataataataataataataataataataataataataataaccaaaaagttcagcaacaccaaagattaaggacaattagagccaaggcaaaggagaaataacaaactaccggcttggtaatccaggatacatggtgctccctccacttaaaactatgtgttgatatagctgcaagacaacttcacagcataaataaattgcatgacattttcaaaatacaacgacagaagcaggagtgctctgtgcagattataaaaagcgcaagaccctctaga

SEQ ID NO: 4028 - DNA, 1177 bp, Glycine max
atagagcttcctgaccctcagcaactgattttatttttccatctcgaatgcattgcactattttgccgcttacttttctagggtcaagtgtcccagccctacaaaattgactgcaagaatgcacgtggaattaataagtaaatggtcattcaataaacaaggttagtttgaggaagtgcatgtgagatgatttgtacttacgcgtctcggtttgacacattggcaaatttagcatctgtagcaaggattaaagaaaacgactggttgggtggtatgtttacgaaaagactcgctccctggaagtcaaaaaacacaattattccaacaataataataacagaataatgtgtaaattacaatattgacactctttgaacattagtgattttacccttgttaccttatttacctatcttaacttcatataaaccttctataattaattatataacgtggtcctttttctttaatacagattatctcttgattaatttgtaattgtattgttatataacttgaaagaagtatgtgtatagtaagactaaaaaagataggctagagatgcaatatcttagaaataatagagttattacaagttatgcagataaaagattgacattagaaacattatttttgtttaagagataaccaccaaacatttagctagtattagtgtcatgtctatctagtaatttaatcaagtattcatataatagttatgagttacttaaattacaataaataaaaggtcaactcatatagcatgcatgtcataaagtaatataattttctctataaagaatattctcctctttatttttactaatattaatttataaataatgattatggggtaagggtataatttgacctacaatactgacaagtagtagtagtaaaaaattataaattaagaaaaagaaaaagagtactaatgacacttttcactaattgttgaaatttattaaaaaatataaaagtagaaaagagagttaataaatgaattgtgagatccattaatttgaaaatgtatgttgttagtattttttagaagaagaataccgtaatttgctgattgtttccaaaagttaaggtactgctgaagtccctgtctagtgtgctagctgcaattgtgaataaccacggagccacattataacagttccaggcgtggtcc

SEQ ID NO: 4029 - DNA, 1201 bp, Glycine max
gtattttgggaaaacatatacaagacagtcacatagcaggaacaagtatgagatgaatactacagaaaactaagttcaagaggcataaacaccaaaagtgagttaatgaaaatagcttctactgcaaagtttactaattggcattagaatataagagtctcaacaagaaccacaaaatttgctatatattcatggctggttacaaaatgggatagatagttcaagaaaactagggtactaaaacaatatagtaatttaggcaagactttttatcttactaactaataatgccacaaatctgcctctgcaagagtggctatctgagacaatatgctaggcttttattgagttatttttccttgttgaagtaagggttaaggaaacacctgaatttagtgagccaattaagtttgcaatacgacttgtaaatgtagaaactatacaagttatactacttggaataaactcgttaagaaaaagaaatagtgcatgcatgccttttaggtacaatcataaaccacaaatattagccacacaaagtgaatcttaccaacaatcaggaatagaaaaaaaaaatccaaaactgagtgatttagaccaggtagagaagtcggcctgagaagaaaagacacctaatttggaagtattagaaatctttttgtcataactcgccatgcatcacatgcacatgcagggcacagtgaacgagtccgactaagacatgacattaaaattaaaatcactaacaattggccacaaattatcaacatgaaaaaaaaaaatattgcagtaactgtatcattgccaaaattatcatttatacatattatacctatcagtattaatgaactaagggactaaaaaacgaaataaggcagtaactgtatcaataacattccaccttcatacaacaaacttgctttacaactgtgtagtcaatgatacaccaaccaaaacccaaacatcagggcacgaatgcaactaagatcactgttgagaaccatcaaatcttacactatcaagccatgaaacaactatttcaatagagggtctctgcctaggatcttggtttaggcatttacacgcaatggcaagcacctccaatagctgtttctcatgatccttgtgccaaattactggatcaaaaatttcctgctccttattctcagatttcatctgatacacccaagacaccagattt

SEQ ID NO: 4030 - DNA, 1209 bp, Glycine max
tggcaatccacacatacgactgtttgatgttaactcaaatagtcctcaaccagtttgtctttctcacctgatacacttgctgcaaaataaatcatttattttctggttcccaacaatttttgttcctgattttgtggcaggtaatgagctatgattcacataccaataatgtaatggctgttgggtttcaatgtgatggtaattggatgtattctggctcagaggatggcacagttaaaatctgggatttgaggtgaagtagatatacagcatgtagtgtaataagtttgtagtatgacttatgcccttaagttcattcttgataatcattgcttatatgtgataacaaaaatgcagggcacccggttgtcaaagggaatatgaaagtcgtgcagctgtaaacactgttgttctacacccaaatcaggttatgtttcaccatttttggtggatatacaatttattcctggcttatgagtacattaatcattaacatggtacaacaagttagaagatgtaacaattaataacaataattaatgcaagaatcagattagtagcttggactgaattggccttacggcatactggttttaggtttttagattttattttacttcatttaactgcttaccacttttatgggttgatataactattgatttatcgattgatgtttatttagatctggattatgacatactttcaattataagtgcttatttgtttcatagcatttcagttgaagaatgggtcattggtgctctttcttcattgattatggttccttaatttttgcaatatccagaatactcagattgcagttcttatagtttcttgctttgtggttctcattgattttttttctggtgatcctacagactgaactaatatctggtgaccaaaatggcaacattcgtgtgtgggatttgacagcaaattcatgcagttgcgaattggtattagttatgacctttttttattgaatatggatatcactgtaggatcaagattcaaaatattttctatccaagaaaaaaatccaaaataatatttattaagaatgaactgtctaaattataagtcttgtagttctaactctataggcatacaccttgcaaaagcacatgatgcttctctttgacctcccacatgtactctaatatagtaatatgcattcaattgtcatgcttcaccaaagggttcttt

SEQ ID NO: 4031 - DNA, 1117 bp, Glycine max
aacgtaaacagaaatgtttttgctctaaccataccttgccataaggagtaaacaaaaatcataaggatatcaaattaaaatcgcaggctcttatctctatgcatacagcatacctcttagatattccaggcaaatgaagtgcttcagtagcatagcccattcctagcataaattgtgctaaatcatcatggtgttctcttccaagtctacttgccctgttagaaaaagtataatgtgagaataccgatatctgaattaaaaagcaatgattatggaaagagggagaaaaaaagtaatcaaaataccattttactgcactaacagcatcaccataagcagcaagacatcggcaacgaataccaggatgactcaaggatacggcatgagcaaccatgtacctaccacaacccaggtatgtatgaataacatcattcttgaagttgaaaacagtatctaatacaaatgaataaccttaaatttgacatccatatataaataaggcatgcccaagttaactatgccacataaaagttaccctgaggccagagctgagacaaagaaaaagtcaaccctcaatttaatcagctggatctagtcatccactaaacacatttaaaaatcatctctttaataagtgcaactccaactttctcccaaatacattttactcctgatcacatcatttcttgtatgtcttcccattcaacacgatatttgctaccaagtacataacattacaacaaaacgttgagctctcaaggtttgaattaaactataataagaccctcctgagttgtaggtatacaaatggtatatgttctagtcataatttaaagggtggatttcataggaattcagcgtgatttcatcaaaacctgaagggagatagataagcataatttacctagtgcaaaagccattgcattaatgtgttctatgcattaaaggggaaagacagaacacaaaactcaatgtgaagaaaaaacatcctactgcacatatgtggaggtgctggactgttggtgctgattggatgcaaagttgcaaacagttatagtatttagtgctgtattaaaagtattggaatcattaaattgtaactgttgaaaataataca

SEQ ID NO: 4032 - DNA, 1083 bp, Glycine max
aaagaattttaaatgcatattataagccatacttgcagcttatcagaatatgcttttattcatcactaatctaattattacttcaaactgagtatcagatataccttagatctcacaattgctggaagagacaacctaaaaagttgcataggacctgaatgccagcggtgttgctgcttcctataagcttcatacgactcaggaacttcacaaggtacctgaaaatttacaaatttaagaaattcaagagagagtacttcagggatatgagatgaacataaaattcaaggtgacataactagtcctattatgcatatacaagaatactactctacaagtacatccacttggaaaagaaaggagacatggatggaaaaattctcatttatacctttacatcatttaggaagataaatttccaaccattcagatgagctcggacagcaatgtccatatcttctacagttgtcctctctaaccatcccccggactcttccagggccttgattctccaaacaccagcagttccattgaaaccaaaaaaattgagaaataccccattgacctgctgctctacctcaaaatggaagcataagttaatgttttggagacgagtcaacaaattctcatccttgttcacaaaagaccaccttgcttggaccaaacctagttcgggattgtcctgtaattgaaaaaaaaaaagaagcatttgcagatattaaaatgtgctaaattccaataatttttactgaatatgtttgatgctcctcactcaaccttgaaatgtggcacagtttgcttaagaaaatcaggatttggttgaaagtctgcatcgaaaattgccacaaactcatagtctttcacatagtcacagctcattgcagagttaagatttcccgctttatatccagtcctgactaagcgatgcctatagattatattgatacccttttggctccatttagagacctctgctttaattaaccactgtatgctctcatcatcagaatcatcaagtacttgaatcagtaaacgatccctggccaatcaatgccacagactgcaggcatgcaagctggcgta

SEQ ID NO: 4033 - DNA, 1075 bp, Glycine max
aaagagaattgaggtcctttaggttgttgtgtatatttaaggaatacttgcaagttagcagaatttgttttcacttatcattattctatttactacctttagctgagtaacagatataccttagatctcaaaattgctggaagacacaatctgaaaagttgcattggaccggaatgccaccggtgctgctgcttcctataagcttcataggactcaggaacttcacaaagtacctgaaaatttacgaatttgaagatttcaagagtagtttagttaagcaaaatgtcacattagcatgtatatgaatactattctagtagcactatagtatgtactgcaaagaatggagatattaatggacaaacaattctcatctatgattaccttaacatcatttacaaagataaatttccagccattgagatgtgctcggacggcaatatccatatcttctacggtggtcctctcgagccagcccccggactcttctagggtcttgattctccaaacaccagcagttccattaaatccaaaaaagttgagaaatgccccattgacctgctgttctacctcaaaatggaagcataagttaatgttctggagacgtgtcaacaagttctcatccttgttcacaaaagcccatctagcttggacaaggcctaattcaggattgtcctgtaatagaagacgggcatatgcattaaaaattacgctaaacacagatttaccaagaatctttgttgaatatgtttggtgttctcttcttaaccttgaaatatggcacggtttgcttaagaaaatcaggatttggttggaaatctgcgtcgaaaattgcaacaaactcatagtctttcacatagtcacagctcattgcagacttgagattcccagctttatatcccgtcctgactaagcgatgcctgtagattatgttgattcccttttggctccattttgtgacctcagtcttaattaaccactgtatgctctcatcatccgaatcatcaagtacttgaattagtaaacagtccctggccaattaatttggcatactgcaggacaagcaaggctggcg

SEQ ID NO: 4034 - DNA, 1061 bp, Glycine max
aaattgcctcagaaaagtatatgcataatatagctgttggttggcataattaaaagtttaattcaccatgtttgtcacactccaattgagaatagaataataatctaacaagtaagaactgcaagtcaacaattaatgtctccttattgaatgaaataatatcacatattggttccagcctcacctttaatatttggcactgtgtcaatagtatccaagattgtgagactatttatttcatatatatatgctttgtcttgtaaaatgacaatgagtctgcattatagagaaaacgagagattagagtaatcttagtgaccaagaatttggcagtgctacactaagtattaggaaaatagcgtgatgccctaatcataatatattcataaataatcagagtgtcaagcaatcaacttcataaaaccaccccaacccgagcttcatttcgtttgatgcccacttcatattccaataataaaaacacaacatagttgatagtaatgttgtttaacattttaataaggaagcattggtaaacctaaaccgagactaaactaaaaagaagaaaagtgcactagtgaagatgggaggtttgacctttgtctattcatgcgaacagcaagtatggaagttagaaaattcaattctctaagagcagctccagtggttgtattgaataaacaaagacggcgaggagacaaagatggctgcacgtgcatcatgcatcagtcaaaacaacaacacactatcagagcccgagcccgagcccaggcccaggcccaggcccaagcacacacggtaaggtagatagtagccattagcaaagctagtttgattacagtacagtacctgatgaccagctccaacgatagcaagaaggttggagctaaacagcatctcagcaataacaaaagctccaaccgctacacgaaggaagggggaaaaaattaacaagaaaaaaggtgattaattaaaggaactgaatttacctctttcataacaaagccttcctgtattagcatcaaatattctaacaccatctctggtgccaacggcaaagt

SEQ ID NO: 4035 - DNA, 1076 bp, Glycine max
gccagacttgcatgcctgcagttcttcttttcctttctagtgtacacttgggtaatgggaggttttgatttaattaaacaagcaaagaaaaagatgggaaataatatttacttactgtttgcatgtctaacaagtgaagatcattgaagaagatagaatgagagcaaccaccaaatattagaaggtaccgctctccttgaatagcagctgaatgatcatatctaggagatggaggtgtctgcctatcaaaatgcaagaaattggtatggtcatatggaacttctctaatgcatgaaaacacactttctgaaagtgtaaaatagataccacttacgtagtctttatcatttcccaagtcatactttcaagatcgagaacatggacatcattcaacagcttcctgctcatatcttctccaccaaacaatatcactctggaaccaaccattgtggcagactgtcccacacgagctacctggaaaaataaattcaaaacattcaaatatctattcaactaaaatcaaaatgactcccaaattacatatacagatatttacaaagaaattttacataattgaatattctacatacataattaaaaaagaaaaagaagtaggaaaaagaagataatgcaacagtaacaaccaatccttgtcccattattaattgaggctggctacatggatccatcagcaccattatgctatttcaaaaacaaaattttcagtaaagccatttaggttaagatattgaaaaccttaaccaaacataaaatcaacatccaataacagaacatcaaacttttacatcaatggacacacttactggaacatcaccagaagtcttaataaccccaaactggcatgtttcaatgtcaatgtatcgaactgcaagaagttcaatgaatattgtaagttttctaagtgttaccatgttataatatgctatgcatggatatgaaataattttatgattttctcccattataaaatccttgtatagatactagcctgttagctcagcagaagattcccttgaattgccaccaagaagaagcagtttctccccccacctaat

SEQ ID NO: 4036 - DNA, 1105 bp, Glycine max
atatctcatgcagataatcaaatgcttatattgaagaagccttcaaagccaatggaaataatcagctgtatttctggtatcaaggttagttcctatgtttgttctcgctgtattcttatttctctgttcactatgtcctaatattatttctaatgcactggaaaaccactgcttttgattgttggacaacatttagaaattattttcttcattgaaaatgaaattaccgaccatcattataattttctccttaatataggcttgcaagcttgaaacatcaattgtcagttttaagaaaacatttgattttgattaggggaatttgttaattcactaacacatcatactatactaagaaaatataagaaaacttgtaacaacaatgaaaaaacaattttattttttatccattttatatcaatatattaatattttcctgggtgcttgcataacaacttgcatttgctggaacttgatataacctttacattttatttttttttgtttttgcagccccctttgtcttctcaagatatatgtgaaggtctttccagccgagttgcctttgactgcacttctggtttattggctgtacaaacagagaattatgccatccaattctacagcttgtttgctaatcgcgaagtttatgaggtaatatctttttgttcaagttttttttcttaaacttcttgaaatggctgggtccaaaccccaccccacccccacccaaaaagggctttagtctttctgcaagggaaatgatcagttagcactaaatatttaattatatttttgaagttaaaaacctagtacatagacactgttgcttttacctctatatatatgtgggttaaaatgtattttcattgtattgagctattttatttctacttctcatgaataattttttaataagctccagatatatcattatgtttttaagttctcattttttttttcaatttacgtttatactttatattaatctggtgtttggttgggtgcttcttacttaatttataattacttttaaggtgtgataacagcatcaaaattaaacacataaaatgtataatgttgaaatttgttttctgcaggtcga

SEQ ID NO: 4037 - DNA, 953 bp, Glycine max
tgatatggagcactggcgagacattttccttactgaaattatacttgctcttaaagaggtaatgtcctattaattgttgaaagtttttagttgtacagttttagtttccaaagaatgtgagactggccaagagtgtcgataaatgttgtccattaattactatgtgatatatttgattaatgcctattgttttctgtctttacatttttagtatctctgttgtgatcttgatgtataatactcattaaagacaatgcttctactttatttatgtggtgagatggcttttcttttttttgatatggcaataagcagttggtgatgatttgtatgtgctttaaattattgtgtgcatatagattgtgttgacaaaaggatcacaagatgcttggcatggggattacttgttctttccaatagcttctaagcttacttcttgaggttacccttgcaggctaataaaaaaaccaggaacagagcttatgatattcttgtcgaaattgcccgtgcatttgtggatgaagagagaggtgggaacagagaaagcttgaataatttttttcagatggtaaatatccaatttaaagttgttcttttatcatgaatgtaaaacaatgaatatcacttcacttcttatattttgtctgacttgataccatcccccattgtttttgtgctgtttcatgagctcaggttgctggacactttactggggaaactccacatctgataagtgcagcagccaaaggtttagcccgtttggcttatgagttctctgatcttgttttaactgccttcaaattgctcccaggcacacttactctcctgaggagtgataataaagagataatcaaggtttatttgttggtcaaatgcattgctgactgaggtaatattatttcctagagctgctaattaaatgtgctctgtcacatcattctgaaggcaggcaa

SEQ ID NO: 4038 - DNA, 1052 bp, Glycine max
aagcaaaaggtcacaacaaccacagagccgcgccaaccccacatatgtgatcaagtcagctgggagcaatggatcaacccaacatttgatttatcaagagagagtccctggtgatgtcaacccaaagaaagagcagtgtgttgatggattggcttctgactatatcagtaagatacgtaacaagctcgggcgtggtgtataaggacaaattattacatgattcaggaccatgtggtcccgagccattctctatgtgacatgtaacttcatatttcaatttacaaaaagagttgataacttgtcacgtgaagattggttgagatcaacatgatcttggatcatgtaataatttctcgtttataagaagaaacttgaaattaaaagtcttcacttatgtgctcctagtaaaaaactattgtcttcgtagttttatgtgttccgtgtagcatactacttacataaacagccattttggttcgcattaaccagctgtaataaactttgtagttgttggggtttctagttaaaagaaatgatgtggctgttgctgatgagtcccaactcaacttttttccttgatgctttctttaatattccttgctggatggacaagtattacatgtagactagttttcaacataagtttgcatgaattatatttaagtatttcatttggttttaagataatttgttctatccaaatcatttatttagtcaatcgctgtttaggtcatggcagatcaaaagatattattcattgggaaaattgaataaaatatcgatagtatataataataaattaatattaccgagtatttgagcgttgcaggcatagtggtggtccaacttacatgtgtggataaaaagataaagtactagaaaccgtgaacaagtggttcaagaatattgttgctaaacatcctgatggaaggttaaccaacatttaagcttctaaatctttattaactacaattttaagcttcaaatgggccatgtagatatatagaataaaacagagaatttaagagtattgtatatgctgtgcaaaagtc

SEQ ID NO: 4039 - DNA, 1082 bp, Glycine max
ttgcatgcctgcagggtttttaccttccatgggctttgctagctctggatttaatatttggagatcctataaagccagacattgtaggtatgattgcaggacatctatactacttcttaacagtgcttcaccctctcgcaggaggaaagttcagattcaagactcctctgtgggtgtatcttttttttaccaggttatggcaactgtgattatatcaaattgtagttatattttaacactagttagttgtcacatttcatttcaaataaattgccaaaatgatgttaacactctgatccgtgaaagtgtatcactcaaaacacatttttgttgcaaggatcacatgatttacatttcctaattcgtattaattgtaacctaaaaaaaagaacttaatatctaatctcctcttcaccaatgatatgacatagattaactcatctctatttataagatctattttttttaaacctgtgttgtttttttatataaggctcaattcatattatcttttatcttaattatttttagactaaaaatatctctaattaaatgagagaaattatatttacatgtattttgaagagagaaacattaataataatgatattttttaaaaagtatattaatttaggacatttattattatcaaataaattaatttttttaattttgataaattagattatctcttataaatattaacagagttaataactttattaatgagtctcctctattgttataagttataatccttagattcggtgtatgtccaaaactagagtgagggaacaagatagtataggtggtgcaaattgaacatcatttactataccaagttctctttttggtgcatatcatatactatagtctattaattttacattgaagcattcttatgatccttaataatgtaccacttcagtcacaaaatagtggcatattggggagagggtactcaaataaatgcccctgtgcaatctaatccatcagctggaattgtattcaaaggaagaagccaccgtcttggtgggactcagacaacaacaagaagaactgcaggcatgcaagtcttggcg

SEQ ID NO: 4040 - DNA, 1078 bp, Glycine max
aaatctaacttcagcaaccttacttgtcaagcatgtccaaaagacatcacgggaaaattagaaataaaacagactacatctcatcatctgtaaccccatcacatttgaccactgggtttagcaggcccaatttcaaaatatatcccaagataaaattctattgaagtgtgaatatggaatgaccaatttcaatataccgagaagaacccccaaaaaagcaacaattatactatacactaaaatataaaaactcaatttacaatacaaggaaaaacaagcttgaaatacatataaacaaatgcaccagcattcttagaatgtggatttggacctaactcaaccccaaaagctaactcacaggatgagggttgccccccacttatatatctattttggcactatctctagccgatgtgggacttgggtttttcccaataagcattctctagtatccaacttggaaaacaacttcatcaaaagacctgagaagtacctataagattggccaagctattcaaaagaaaagcataaacaaacaaaaaatggacttgggcatgtagactatgtagtcatgatttggaggttaaatcctccaccaggctacctatccacctcatttaagtcacaacagacaggagactaccaaccttctagacgctccttccacacagcactttttaattgagtgatagtatccgactgtataagagaacctattcggctttcaatctcttcaagactcatctcagtaggctgcataatgttacatacacaaagattgtatcattagttctcacagaatctgtgatggcagattcagatcagagaagaaaaacagatatcaatttacctcaacatcctcaggtggttcaacagattttgaagccttcacttgtggaactccatctgtttttttgtttgtccccgactttacaaccccccctttcttagcaacaggctggaatgtgcaaattattgtacatatcaactcgcatgcataaaaaataataccatatgttaattttacaagcaagaagatgcaatcttacaactgactgaacaggtctctttccactaa

SEQ ID NO: 4041 - DNA, 1239 bp, Glycine max
aattcttctacaattgctttgtcatcatcaacgttattagtcacggcttttataaaaattgcaggaactttcagtaggtcggcaacataagcaatagcagctccctggagaaaaagttgaaacgggggagttaagttccacaaaggaaacatgagaacaactactagttattcagtcctctgcaatttaaatggggattttgtttcatgatacaagatgttacttgtgaatatgtggattcattccattcccaatagatgagcggaatgtcccaaggtataacacaaataatcaggttacctccatatctataactgtggcatcatttgcaattattaatgatccatcctgctgtgtcatgtctaaagagtcaccagtagacaatttagccacctgaaatatgcatacttgactttgaaatgtaaaatggattatggaacataacctcgtttcagagtagaatctttatgttgtgagaatgtgagctactactactactatcattattatcgaggttaaagctatctatttactagctagattatcaatgccaaggcagcaatacattggcaacctcctcatacaccaacgctaatgtaagaaaaaccagttccattcaattccctctaaattgggtataagtccaaactcaagctataccaagatctgcctcaaaataacacacgtaagtaaaggtattaatgacctgaacaaagtaaaaagccaacaacttggcggaagcttaacaatttttcttacattggcataaaatggtttgttttcttcattcatttatgatttactattgatagcatatgagactgacaagtgaaaatgacttgaacttataactctccattgtataagcagaaatgtttatccgttaaggcatatcaattcataaactagtctacaaatacaatatgcacattattatatgttggcttcaaatttaatccttgaagtcaccatatatgcatatgatgtcagtatgaaaaactaatccgaaatgaactcctagtcaaaatcaatgtcaaaccaagagaatcatagaaacaggaaagataatttttgtgctcaaaggcacaaacttcacaaacatgggcaattcttcaatccaggtaatctggttaccaaatggcacataattcagatggcaaaatatattgtaatatcaagggaattgggttggcaatatgaattttgaacaagactaactgttatgaagagttttgtttt

SEQ ID NO: 4042 - DNA, 1298 bp, Glycine max
agttttttcttgtggggtaatttagtgtctggaaccataccatcctcttttggaaactgcacagaactatatgcacttgacctttcaaggaacaagctgacaggttttataccagaagagattttcagcttgaagaagctgagtaagcttctgcttctgggaaattcattaacaggaaggttgccatcaagtgttgcaaattgccagtctttagtgaggctgagggttggagaaaaccagctttcggggcagattccgaaagagataggccaattgcagaatctggtgttccttgacttgtacatgaatcgtttctctggaagcataccagtggagattgccaacatcacagttcttgagctgttagatgtgcacaacaactacctcactggggaaatttcatctgtgattggggagcttgaaaatttggagcagcttgatctcagtagaaacagtttgacaggtgaaattccttggagctttggaaacttcagctatttgaacaagctcatcctcaataacaacttgctgacaggatcaatcccaaaatccattagaaatttgcagaagttaactcttcttgatttgagttacaacagcctttctggtggcatacctcctgagattggtcatgttacaagcttaaccatcagtttggacttgagctcgaacgcatttacgggagaaatcccagattcagtgtctgctttgacacagttacaatcacttgatctttctcataatatgctttatggagaaatcaaggttctggggtctctcacgagtctcacttctctcaatatctcctacaacaacttctcaggtcctatcccagtaactccattcttcagaactctatcttgtatttcatatcttcagaacccccagctttgtcagtccgtggatgggactacatgttcttcaagcatgattcgaaaaaatggtttgaaatccgcaaaaaccatagcttgggtcacagtcattctagcctcggttactataattctcatttcatcctggattctagtaactcgtaatcacggatacaaggttgaaaaaacactgggggcatcaacttccacatcaggagctgaggatttctcttatccttggactttcatcccatttcagaaaataaacttcagcattgacgatatcttggattgcttgaaggatgaaaatgtcattggaaagggttgctcaggtgttgtgtacaaggctgagatgccaaatggggagttgatagcagtgaagaagctatgaaagcaagcaaagcagacgaagcagtggattctttt

SEQ ID NO: 4043 - DNA, 1013 bp, Glycine max
ggtgattttcttaataagatgagttgatttggttctatttggtgcaaatcacatggtatttttaagggagtttctttaataaacgtataaagggattaggtagcttttagcccttgatgttatttctttattgctgttattttatttccacatcttctgtatggaagatcagttatcttctgaattatttctacttttgattttcttttatcaattttaaaaaatccatctttgaaggttttggattatacaatataaattggaacttgtgatatcatttgtagaaaaggtggcttaaaatctttttaaatttatggaaatcagacatttattattgcagttgcatgggcaagtgtgtttttgtatgcccctatacatgggttatgtgcttttttttttgtcaactttgaaggaatataaaatcacccagaactcaaactgttcattttttaagggttgatttggttgctaagctgtctagttatggtattgttaaattcagccattctctttagtgtcattgggtatgatttgaaatatttgagagctaaaattttgcacatgtagggcttgaaaaatgcactagccgctggtgctgacaaggatgaagaagattcagagggaagaactgctttgcattttgcctgtggatatggtgaggtatgctaatatttggagtgaatattttctcatctcttatatcacatgctttttgtttcttagaatgtctgcttatgttgttgggtggtggtgttgactttagaaccatggtgcgaagtaaatgaaggatatattgaggctcagggtattatttagtaaaagactgtggtcttgattgtttcttccaccatggtgggcaatgcaggcttgtcaaacatgttaaaatatgagagtcaatttctaaagcattgctgaaatttggggcgagtatgggttggacttgatgacaaccattggaagcatctgaaatttccaactgtctgatttttcttgggtaatggagaagctaccgg

SEQ ID NO: 4044 - DNA, 1163 bp, Glycine max
accattttcaaggagaagggccacacattcctttctgccataaccagctgcataatggagagcagtgttcttattcttatccaaagcatccacttttgctccagcctcgaggagaacttgagcacattttacctgaaatgataaaagagcatgtcagccaggtgttagaaagaacctaattaggatctaaaattataattcctgacaagccattcactttgcttgacaccatgggagagggggctgaaggaaggtagaacccaaatagcactatccattaaccactgacactgctgccactctccaccaccatggtggaagaaacaatcaaggccatagtcttttactaaataataacctgagcctcaatatatccttcatttatttcccaccatggttctaaacaaagtcaacaccaccacccaacaacataagcagaaattctatgaaacaaaaagcatgtgatgtaagagatgagaaaatatttactccaaatattagcatacctcgccatatccacaggcaaaatgcaaagcagttcttccctctgaatcttcttcatccttgtcagcaccagaggctagtgcatttttcaagccctaaatgtgtaaaattttagctctcaaatatttcaaatcatacctgatgacactaaagacaagggctggattaaacaataccataactagatggcttagcaaccaaatcaacccttaaaaaatgaacagtttgaattctgtttaattttttactccttcaaagttgacaaagaaaaaggcacataacatatgtatagaggcatgcaaaaacacacttgttcatgcaactgcaataataaatgtctaatatccataaatttaaaaagattttaagccaccttttctacaatggatatcacaagttgcaatttatattgtataatccaaaaccttataagatggatttttaaaattgataaaagaaaatcaaaagtagtaacaattcagaagataagtgatcttccatacagaagatgtggaaataaaataacagcaataaagagataacatcaagggctaaaagctacctaatccctttatacctttattaaagaaactcccttaaaaataccatgtattgcaccaaatagaaccaaatcaactcatcttataagaaaatcacca

SEQ ID NO: 4045 - DNA, 1104 bp, Glycine max
agtcctcctggaaccaagccttgcaggtgaagcacagtaaaactttgaaggcagctgatattagcaagtgacagaagccccacatctgtaactgagctatatgacaaatttatctgcaaataaagcaaaaaaaatatataataacatcagaatcttagtaaagatttcttaaatctttgatgtttcccagaaatgtgagacacgaggaaaatacctgtcttagattttgggagaaatgagctagtgcaatcatcccactgtcatcaatgttgtaacacttttttatgtctagacgacttagttgtctgcaattcattgcaatagctgccagacctatggatgtaacaagaagacatcctcgaatttcaagtgtcttcaaatttgaacattttgacaaggtgattagtgccctgtcagtaatgctagtacaataggatgtatttatcatctcaaggccagggcaaccccgagcaattgctgaaatgcccaaatcatctacccctgtagacctgaaaaaaaggggaacaaactctgatgactacgaacataaaacttcaatttgacaatatcactcaaaaggatattcatgttgtacttgcatctgtaacgggatttttttttggggggggggggaggtggatgcttcagacaaggtaggcctgagactgttgttagactttattaaccattgatctactttgaaatttaactaaagccagttagctagacttatatgccttccacatgtattaaatatttcaaatgtttatacatgaatattgaataccaactactatggcaatttatatcccataattttattttaaacttggcagttgacaactcaacctgattcgatagtcatactagttgttgctaaaatagaaattaaaagaatgcatacacaattcatcttatgagaagaaaagcaaatgctcatgaatatgaatcacaaacctgtatagatccagctcctttaattttgagcaatgcatgccaacataggtaagtcctctgtcagttatgttcaggcatattcctattttcaagctggagagcctagaacaagaagaaatggacataagacctgcaggcatgcaagct

SEQ ID NO: 4046 - DNA, 1110 bp, Glycine max
ttgcatgcctgcagaaaaaaacatagttgtttgtaaaatggattccttgtcagtaaatctctcattttattccttgaattttacacatttatttaagggggataccttatgatgacgtggatctctttttgaaatgttcatagtatttatttttatagcgtactacggtttctatgtttggaattaactttaatccagtagattccatacgactttgtgtgggatagtagcattataaattatgggtaaaataaagtaaattaaatactccaaacccacaacaattgagaaagaaggatgacatttggcgtttcttttgttgattatcatgtactcaaccctgctattgtttattgtcaaagataggtttgcaattcctactgacttgaaagtggctcccaatattgtttaaagaaatatttatctttataaatctttataataataaaaataaagaagtttgagcgtgaaattcttatacaattgagtgggaaatattttgattttgatttgttttacccgattatttataaaaaaatcttcataccccattgcccagaggctcttcgctatgcgaaggtatgggggagggatattgtacgcagccttacccttgcagaggcaaagagactgtttccggattcgaacccatgacccgattatttatatttttataaaaaaatttgtttaattttttgaattatgagtaaagttgtgtaattattacataaatgctgtgaaatttttaaaagtaaaagatgaaatatttcaataaaaaaataaagagattaaaattatgaattttttaaacattaaaaaaaatgtctcaattaaaaaaatatacagatttgaaaaaacgaacaacaaaaattacattttttcctaaaatttgttaaaggaatcaagaaaataattaaagcattaaaataaattgtgataaatagagaagagaggaagcagcagtgcctatggatgattgtttggtttgtgggaatttggtccttatgacttcataggaatgctgccattttcaaaggggaacagccgtgtatccaaaaagtgcttgattcagtgttccttaaatcgtggtcatgggttaaggtaaaattt

SEQ ID NO: 4047 - DNA, 1227 bp, Glycine max
ttgcatgcctgtcaggcttataactgatacggtctggtgcttttacagtccctgatccttgatcccttgccagtgcaaatatatgagctgttctagaaaacttccgcattcggtctcttatatcaattccagaagtccatggtgtgacaattgagaacataccaggatgcaatgaaggtgtttggatcactgcaccatatccagattgttcaaactctgcaacaacagttgacattgctgtcattatccctccttcatagctcttcttatatgcctctggccacacctcagattcaggtgcatctgggaagtagccccatgccattaccactggatgaagatgcaagttcttccctatgttctggttcctcaagccacttcttttaagcaatgctggagtactcagtgctccacatgctacaattgtgactttggattccaccacacaaacgtctttagttcctttatattcaaactcaaacgccactccacgcgcaatctttctatcctttccttcctttttcttgtgcaatacttttattgcctcacaacctggaagaattgctccattgccagatttcaccaagtccaccaaccatgtttctgaggtacccttcttcctcccatccttacaacccatgcaacaccagccacagtagtgatttgaaggagaattcctaggaatgttattaacaggataccccatttcttgacacccttttcttagtattgcattgttgaatccttcatcttcaatctcagattgaactcccatcttcccacagacagcatccaaggcttctctatacaattcactctcaaacaactctagaccatgtttgtcacaccactccttgcacacatgctgtggggttttaatgcatgcagaccagttgattgctgaccctccaccaacagtggatcctgatagaataaacacacccatatcatcacttgcaaccaaaccaccattgaggtacatttgatccatggttggtccttcaagaagagaaagattgttcttagcagaatagcctcctttctccaacaccagcactttgtaaccagcttttgcaagaacaccagcgataactccacctcctgagccagaaccaaccaccactgcatcacattgtatcaccaaagaaggacatgacaagtttgcggcagcagctttatgcttcctacggatgaccgatacagggaatccgaatcgtcttagagcat

SEQ ID NO: 4048 - DNA, 1230 bp, Glycine max
ataaaagtatacagtgtaaaggtagaattacaaatcattttatccatattaaatttattttctttgtagctatcttatccttatatgagctttatatatctgttgttttattctttcagagaaggagaatttgtgcttatatggatttcctaatgagcaatgggaggtaaatttacccgttgaagaagttcctccagagcttcctgagcctgtcctaggcattaactttgctagggatggcatgctggaaaaagactggttatcattagttgctgttcatagtgatacatggttacttgcccttgccttttattttggagccagatttggatttgataaaactgacaggtatatatcttactgagcttaactcttatatctcaagtcaacttgtaatgaagctgattcaagatgagattgaaaataaggaactaaggatgcagtttgggtcaaactacctgatttatcacattggttcagtcaagtttgtgtaggattttttaacttttgtttttcctttcaccaccctccatgttgagtacaagttttcttattgcttagtatgagcaattttctcctttcaatagttattttgctgcatcactgctatatctcagttgatttgtaatattgtttgctgataaattattgctgaagcagttgtccaccatggagaggggcaaagatgttaaagaatagaataacattctttttctttttctttttcttctttctgagaaaaaaatgttgaagaggaatagagaggaagaagaaagaaagaacaggcatagcagtttcatgtctactttgtactgacttatcttaagatagtgcaaggaggaaaagtaggacttctgatctcatgtgaatggaatatccccattggtttttttgtttagcaaccacaatcaatgttcttcttgacatcatttagtagtctgtgtatgttcttgataattggtaatgttgtatgttttctcgtgcatcaatctactcatgttttggcatttgtaatgcaggaaacgactattcggtatgatcaatgaactaccaacaatatttgaagttgttactggtgaagcaaagaaacaagttaaagagaagtcttcggtttcaaacaacagtggcaacaaatctaagtctaactctcaagcggtaaacaatattttcccccccacgctcatacatgacaaataaatacagttgttcataaatacttatctatctgag

SEQ ID NO: 4049 - DNA, 1270 bp, Glycine max
aaaggaagacaaaaattaaaactaagcacataagcagtaactttcacaatatacaagacttgtattgtaaagtgagaaagtcaaggcccatccactaaaatatcttgtaaacctaaatcacttcaaatcaacagctgataaatcctcatttcctcacttcaaaaatttccacagttcagtaggaaaatatcaagtccatcatgactatcaatctctaaagtatttaaaaataggttttcaaatatccaaggcacaacccttagaataacatcattgaaatataacaaatgaaaaaataaaaataagcaacaaaacagaacaaacttattcaattatttagtcaatcaagacatcatacctttttcttttgtggctcttcactttcatcagaactatcatcatcatcatcgatatccatcttcccctgttgatcatcaattaaacaaaaagttattcgataagcaatagtcaagttacatttcaatatacaacttctgggtattgaaggcacttgtaagattcagaagaaaaaaacaaataaatgtaaatataattgacgataagaagcatcattctcaatttagcaagagtgcaattgacttttgggtcccttataaatataaacttgaaaaagaaaactctttttaaagaaagaacacctagaaaatttaccttgtcttcatcagagctgctatcatcagaatcagagctttcaaccttcttttgtgcacgagcagaaggctttgatacagcagttacagcaggttttgcatcctatatagatccaaatatgtgaataaatcatctcattccaaaaaaaattaaaaaaacctaacaattatcagaatccattacatccagtaacccagtacttacattgtcttcatcagagctttcacttgattcatcatctgagctttccactttcttcgctggagcaactggcaatgtaggcagcttagcagttgtaggttttttcttactctgataccaaaaaggtacacaataagatgacattacacagtgaattaaaaatactatcatctccatctgacttactagaagacagtgggtctgaatagaacattttggagaagatattcatttacttggtggtttctactttgatattagagaatatatacagaacaatggtgtcacaaggaaaaaaaacttactttgccttcatcagagctgctatcagaatcagagctatcactgtcagaactttcacttggctgagttttctttgtagaaggcatgtccattt

SEQ ID NO: 4050 - DNA, 1110 bp, Glycine max
agaccaataacacatggcattgatgaatatatgcatgtccttgcactgaattatatacacatcctctcatgtatatgataattaaatcatgtccagcacgtgtattatctcttttctcataaacattaatcatgtcatatataaaagttttttaatgtctatcaagagagagatggacacaaaatttgaattcttgtgttaaaactgaatatgagaggatgaaggaaaattagatggtcgaagatcttcttgagagttgattatattaaggtcatggttatgtattatatggatatcaaaaggggtatattcatctttatcagtggtttcttggttgtctggcaaatcttgtaaggacaaataatactttttttattacttttagtaaaaagattttattaactagtatttttaggacattaattaaaaaattaaaaaaaatatttactgtacaaataataagaaaacataaaaattattgtgagtaacataattttatgtatctcaataaaaaaattattttaatttttaataaataacatgaacattagttaacatttatcttagtaaaaatattgaaggatcctattcttcttttactactctttctgtctcattttctgtgctagtaatatatattctttacctgtttccaagaattctatggatgtcaattatgatctgctcttcttcagcagtgaaggaacccctcttcagatctggccgcagataattaatccatctcaacctgcaactcttcccacatctttgcaagcctgcacattaaaaaaccacatcatcttttatttgttctatcacacaagaaattattaatatatgatcaggaactattatataatcatgatttcaatcaatctttttacatcacgcatatgtgtgtgtctctcagctaataagaaaggaactaagaagactttaatatgtgtcatgtgaacattgattgaaataatatgtagtaatacgagacaaatgtatgcctgcaaattttggcactgaactccaacttttatgtccatgtgtgttgatatatctaagaagtttctcatcttcttcaggagaccataaccctcttttgatcttctgcttgct

SEQ ID NO: 4051 - DNA, 1034 bp, Glycine max
aatcagtatgcacaccattatattttttatattttttatattttaataaaagaaacaatataatagaagagaaagaagaaagaactactactaagaacaccaaataagataccttaaaagatgtcaaagaacacagaacccaaaccaaaaaagggtaaatgcacatgaactgagcaaagtccaccagtctctttgaatgtcaaaagaaagaaagaaaaaaaaatgaaccactctaacatagacattagctaatttccaaagtgaagctaagaataacactttataacctttacgttaagatggaggtcagatctataagtgcttatatcgagtttatacatgccactgcacatccgacgaggcttgctgataacaacgaacctagacccagaagaatctccaagagaccctcaggatgggaggagttcatccattagaatccttcagaagctttcagaaaactgggggtcacaaaaggaaactcaccatagtagaattcccttcttttgtatttccggccgttagtgccacgtagctgggccatgtgccttagatccttctcgaatattgcctgcattcttcaaatctgtctagcgaatcttcgtccctgagctggcaggaccattagcatttgtcatttatgtgtgcaaactctataaatacgactatgaataaatgagaaggcatcagaaaattcaccaaatttcctcttcttcttctaaattctaggaggcagtcctgacctcgaattcaggaacattgatccacttaccacttgccttaccatggtggtgaatctccacaagaaatgatttggaacagatgctggaatctactaatgagggggccaaagttataaatgtcatgaataaaaatactaagcaattaataggccactgaaatagtactcaattactgcatatagtcttaggttagttgtaattcgtaacacactattgggcccatccccataggtagtctgtttactcatttaaatttgtattagtcacaggccatcacatgagccagtaata

SEQ ID NO: 4052 - DNA, 1273 bp, Glycine max
attttttttgacagaaaaattcgcaggaaattaactctaattttgtagtagtgttaatacctgtgagaaaccaaaatttataactaagattaatttacatattgaacctatatacaataatttataaattcatgacttgtatgtttttattttaattattcatgattaaatctaataattcatatttatttatttcactcacatatatatatatatatatatatatatatatatatatatatatataaagaaaaacctcttgttatagatacgcttcatatatggagagcgtacaatatataatataagagcgtaattaagataaaatattcttaactaaaactaaataattaaaactataactaattattaaaacaacttttagcatttatacgtgattatttggtaaaaaacgactatctttaagctctaactagatacgtaagtatattatacgtacattgtcgttagtcattacagtgctattacattattcaacaataatataaaaaaagttatttcgcaatataccatacacaagttttatgcgtagcagaagtagttaatgaaaacaattatataccaaaaaaataaataatctcgtagtaaattcttctcgtgatagtcataagaaaaatgttggtaaagattaattataacacggcatcttccattaatttttttcaataatcaatagacacaaagcgatagggattctttgtatgagtccatgaaagtagaaaacctgttgaagttgaacaaacaccatgaaaaactgagaatcatccaaacccaatacacacaaagcaagaggaattggagtggttccaaaaatctcggcctaagtggcttcatgatggggataggaatactaaattctataacttgaaagcagttaatagaaaaagaaggaaaataattattatgttgtttgattatgagggacagtggattgatgaagaagctcaaataaaaagtcttgttaattctttttacaaagacttgtttagtgatgatagctcgatggggattggaggcaaactatgttttttttttcctgctattgaggacagattaatggaatatctaaacgagcctttgagtatagctgaaataaaatgtgcagtgtttgatcttagtgcttggaaatcccctggatcggacaaatttccagtgggtttctatcaattctcttgggatatgcttggtggtaccattttgtagttctatccatcatatttaatttgggaaaatcgacaggcatgcaagctgg

SEQ ID NO: 4053 - DNA, 1003 bp, Glycine max
ttgcatgcctgcagcatacagctacatttcaaacactgcctgataggaaacccagaagaatacttctagaaatgagttttattcaactgaaagaggaactcaaagctcttacaggaagaagaaaaaactcacaccagtcccagagctgaagctctaagagatagctctctgcccaaactaacaccacaattctctccttccccattctggtcccctttcactccctaaaaactggtagaattcctaactgttgactcagactaaccacttgccaacactggtaaatggttactagctgactgtccttcctctccttgaataaactagctaagtcttgtgcccaataggatcatggtccagaacctgatcagcttgagcttgagggcttactcagcatttgaactcaaaattctgaattctaggcagtttgacatttttcccttagcatatcaaaaactgcaattgactctattctacagctactctgcataaatttatataaagcatattcacctaaacattagtactatatgcaacaaggccaagaatgctagttttaaactagttaaagtgcatacaaatccaactcagtgaagtcaacattcaagcccgatcagatataaccccaatagcactaagattttaaattctgatctggtgctgccaacattaaaagttgtctagagctggtcaattacaaataactaaaacagtcaaggacatctttaggtctatgactctaattgagggttatattccaaaatcctgttttcactcaatatgtgtaacccttataccaagaagaaattacttaatcttgggtatatttattcataatgaaagaaatgaaacaattatagatgatcttaaagggtgagaaacagcttacaattcccaatgcaacaccatcgaaagcagtgtgatactcaaagcttggagttggaagttcaggagttggataagcaaaaagcaagaggaagctcaaggcagcccaaaaggacgt

SEQ ID NO: 4054 - DNA, 1117 bp, Glycine max
cgcttgctgccttcgtgttgcttctgaaacatccaggtccaaattcttcatgtacaaatttgtatatctagcatcagggccaggcaaaatgcgatcactttttttgacaaacttcccaacatatctgaacaagaatcataaccagaataaaattaatatcagaaaacaataggtgtacagaaattgaatacaaattacaaacattaactgtagaggcacaagaatcatatagtataatatcattattattaaggaacaatgcagagtttcacatacaactgcttatcaccaacagtagagccgttcagcttctcgatggcaacatttgaagattcttctgattcaaattgaacaaagccgtatcctttgctcttcccatcctcagacatgacgactttgctggacagaatattgccatattttttgaacatatcttgtagtccagcattatctatcgattcaggtaagttctgccaagccacaagaaaaaaaaacttcgtaagaaaccctttcaagaatcaacaaagaaccaaacaatgccctaactatttcgaatcaaaactctccctaaatagtagataccttaacaaacaagttccctatagcatttttcctcgcatcaggatcgcgacgcgaccacatcaccctcatcgctttcccattcagcgtggagttatttttcagctcgattgcacgaattgctataataacaaccaccatttcattattaacaagataagcacactaagatctctctcaacatttatatcataagtcaagtaagatcaagattttattaaaagaaatatataatcctaaagaaaacaaaaagaaaggtgaataaatgtgaaacgcaccgtcttgaggagaaacgaagttgacgtaaccgtaacagagggatttgccggtggaggagtctttgcagacgcgaacagacgcgaggctctcgaagtcggagaatgcgtcgacgaggtggttgtcggagacgttggggtggaggtcgccgacgtagagcgacgccggagcggcggcgaccgacggaggaaccgccatggatgatgatgatgatcaacggaggaggagtagagagagagagagagagagagagagagagcac

SEQ ID NO: 4055 - DNA, 1040 bp, Glycine max
  misc_feature (565)..(569): n is a, c, g, or t
  misc_feature (571)..(571): n is a, c, g, or t
  misc_feature (575)..(576): n is a, c, g, or t
  misc_feature (579)..(579): n is a, c, g, or t
aacctccatcaccatctggctctttctcatagtgtagatttgctgtagcaaaagccacatcctcaatcctctttgcattctcttcagccttttcctggtccaaagttccatacttctgtgtgaaaatcgatttagtagtcagattgttggtcatcctctccacaagggtctgcctagtgttctgactaggaggccataatttgattgaaaatggtctcggctgtgaattcagctccatggcaatgaaacctacaagaactgcaagtgcaagtatataaatggaatattttaggatacataacaagagtaaaaaatagttcaagcagacttgttagagaaaacaattgtaaggcaatgtcattcatagatgcatgtcctcaatatggtatcagcccttgtcagacagaataaaacattttacaagcccttaacacaaatttgagttttgaatggataaaaaaaaatgttttacaaaacaggttagttaataggagcagaagtaaaagaaatcccatccaagaaataattgctataacatataaacatatatatacacccaggcccnnnnncncaanncancacacacacacacacacacacacacatatatatatatacacacacacgtaaagtggattgcaataataaagtaggggcatgttcctttccatttcaatcatatcatgttaatgaaactaataaaaacttcaaagcatgatgaaaaaatgaaaagggttagggagtttataaaggaaactttgcaaaacataccatgaatgtacgtacgaggttgtttcctctgaagagaagagaacactcacaaaaccgtcgacagtaataaataaccgacaatcaacttagtttggttcacccacaaatcaaacccatcctaataaaaatcttagctttaagctcgaatgcaacagatccgagactgcgcaaagatacaaactttaaacacgaatttgaaaatctttggagaaaggggaaggaactgggaacagggtagactgaaataaagagagacaagtttgacaacc

SEQ ID NO: 4056 - DNA, 1150 bp, Glycine max
ttgcatgcctgcaggctctgaatcgctggggatactatccactgattctgataggatcatgggcttttggcactattaaccacattcatgatttttttgaacccaaccataagatcttttggctcacatttcttgatgttggaacagctgctcttatggtatcaacaagtaaccatgttaattttagctttaattttggttcactgaatgttctgaaacttacctggaattctggattctcagcatggttgtcattagttataaatcttctcttataaacttttggcatctccactgatcttctagcacccacttgtgagccttttacacttttgaacagtcatatgtattgtcttcccggaggacgagccctggtgcagcggtaaagttgtgccttggtgacctgttggtcatgggttcgaatccggaaacagcctctttgcatatgcaagggtaaggctgcgtacaatatccctcccccataccttcgcatagcgaagagcctctgggcaatggggtacgaagtttttatatgtattgtcttccctactaatatgttaataacagattaaaatgcattatctaactggtatctcagatacatctaaataattgatatttgatatatttaagcatttgacttgattggtgctaaaatgtggatacgactagttcaaaattgttatttcgacatctttaaacaaaaaatacaaatattcatatagacaccacgtgcataatgcaaccttatataatttagagtttactagcttgtaaaaggtattttctggtgtttggttactgaaccccagtcagtgctataagttgattgtgcttgtcagggttttagagtggtttgattccaatttaagccgcatgttgtatttgctcaatgattattctctgggtaacagaaaacaagaggttaattcttacaatttaaacactagcaggtgatgccaaagtcaccattgttttagaggaggatatggcaatataggaacatttttgtatcatcagcctatcctcaaattctaacaaaaaaaatggaagttcatcaatgctatggaacgtttccctgttgtattagcatataaacatatttgacttatacacaagggtattgcgttgtatctctgcaggcatgcaa

SEQ ID NO: 4057 - DNA, 1243 bp, Glycine max
atagtagaggaagattggtggctgggtcatttcagggatacactggccatgtggatggaaaaccaagtgatgctcgtttcaatcatcccaaaggcataactgtggatgataaggggaatgtttatgttgctgatactcagaatctggccatcagaaagattggagatgctggtatgtgataactgacaatttgagttgcaacttagaagtactcaagatctactctggactaatatggtgtattggtatccgacaatatagaatggaatttgaacttaagtgtataaataggaattcaatagaagtgttactagtgctctatgattcaattgtgttattcattttactggaaatctgctagagtgtttgacttgagaatcccacagttcaataccatggcataatggttaatcccttcatttaaacaatacaaccagtggctatgggatcctaatgtattgagaaaattgtgagtgagaatgttgaaaaaaaaatttgtaactgatctttgtgagtttttttttaggtgtgacaaccattgctggaggaaagtcaaatgttgcaggctacagggatgggcctagtgaggatgctaaattctcaaatgatttcgatgtggtatatgttcggcccacctgttccttgttggtcattgatagaggaaatgctgctcttcgacaaatctctcttgaccaggaggactgtgattatcagtctaattcaatttccagtacaggtttatattcttatcttgttgattatagtagatatcatttggattctgttaatatccttgtattatttactagattacttagtttcctttgctactttattctttccctaggtgattctagtcccttggggatttagttcatcctagtgatgtgtttgctcagacgttgtcttagctcccttggctatggttcataaatgaaatggaatattccagtcagacaattactatttagtttcactatgttattcttaatggatctgattttttctttatcagaagattatcctataaatgcttttagtacataaaatattcgcatgtgttggtgttactgaataatgtgaatttgctgtatttagcagagaagtgaaacaatggagaatatgttaatgtgaaaactgatgatgtgattgcattttttatcaagtcctttagattctctataatgccaatcaacttctgattttagttcattttgtgggttttcctgcaggcatgcaagct

SEQ ID NO: 4058 - DNA, 1046 bp, Glycine max
ttccttttgtgcatctcatccttaaccatctgaaaatttgtattttataaacaaaagtaagggatggatcataacatattttttttgtattgctaagaggaatatagacaaaaactctcgattgtcaactcttcacagtacaggctgatacgcacacaaatcattagataacaagaaaacaacaccaattgagagacgacaacaacaacaaagccgtatcccattgagtttggctaaatggatcactcgacaccatttggctttggttaaagatcaaagtttcagggatacaagtaatatgctacaaaccatatctactctagcaaattgcacatgtctttgatcttgccatgtgttttttccaatctttattcaagtcttctttgatactcactacatttgatgtgcatgtttttctttcttaagatcgactaagaccatagtaaacataaaaaagaagtaactcatgcaggtatttacagttaaaatgaattcaatcactacaaagtaaacatactgccaccaaataataattagattcttaggtggatatcatcaatcatgaaccatgcctgtgccatattggagattgaagaatgtgaattattttgaactttccaacttttccaaggctgtggggtttgagttttattgggtattttggtttttaataaaatggatcatatccattctccaaaacatttttttttcctattggagagatattctggtccgtttttagattgtcaacagattgaaactaagcttccagaggagtaatcatgctttttctgggacaggcatggggggatgaggctgaaagtatacttgagcttccattcttaatattcttcataaacgttagagatatagggagttaatatgctttaaaacaacagaaatgaaatgcacaatcataaccttgtcttcaaagattacaacgacagtctaaaacctattgcttataataccttgtttttggctctaaatgtgcattagaattatacaatatataatcaaatagctgcaggtcgactctagaggaa

SEQ ID NO: 4059 - DNA, 1201 bp, Glycine max
aaatacagaggacggtgcatcacatttattcttccattgcagcaaaatccaacccctttggtgggaaaccatgtcatggctacacttacaaggtgcttttcctctaagtccaaaaaaccattttcttcaacacataggtgttcaagtggatggtgtaaggttcaaaagatggcactgctggtggttagctttaacatggtctatttggaagctccgaaacagcatagtgttctctaatgcaaccttcaatgctaataaattgcttgaagatgctacattcctcatctagacttggctaaggggttttgaaaaagatttcacaatccactttaaccaatggtcaagtagtattagtcaaggtttctgtatcagtagagactagaacagtttgcagggcaacatctgtatatttcatttattccttactttggttctcctttagactaggattgtctgactgtggaaccagcagtaaggtataatatatatgtatatcagtacctctggtactgcattttatataaataatattatctttgctgaccaaaaaaaaatcggtgaagaggttttcaattgctttgttgccactgtaaagtttggttaagtttattcctttttgtagatttgtttctgggtttggtttttaagccttgggttttcctgcttagggtctaaacatgcattcgtgcagtagataacaagaagatgagcaagcaagcgacaaaagtactatattttttaatcaatcaaactattaatgaattctccaacttttgagatttttttacatttccatttggttgttgctgtgttgatgattagtaagttaaatgctctttcggtcatatgtatcacttttgatgtttatgttgcatttcacttcttgatctttggaataacctcaatttggcgtttaggggtacaggtattttatgatggcaatcaacaaagtattaattatttatctatcaaatgaaagtaaaaactttgtttataatatgtaaacctgaaaccctaataatgtgtctagggtaggctaaggcatataatatgaaactgttgagatcatatccaatggctgaacttcttactgagattatattgttgcatatcaatattggataaggttttatggttatggatttatctctcttatagtttgtttgataaaaatatttgtatttctaggcttgagtttgta

SEQ ID NO: 4060 - DNA, 1206 bp, Glycine max
agccttgctatgcctgcagcaaaagtatactaaaaataattactattacatacaagcataacgtgcaagcagagtgataaatactttgtacatacattacagggaatctgcttccccaagaataaagcaagccagacagaaatgtaataccacttaaccaaactccccaagagcattagcaatttagcacaggcacctgcacatataagttaagaaccatctaacccttcaaaggtcatgttctcacatctttgagtgcacccactttttcaagctcaccgaccaaatccttaagcgatggaaccttagtagccaaggtcctgtataatctagaatatcgtgcccgagtgccatcagcagtccttgctagagcaagcaagcttagagcctcgggtagttcattaaatacttgtttcatttcctccaagctcatattttccaaaacggagggtctaggggcaatcctcacaatttcactaccttttggttcctgaactcgtgcgtcggctttaatgactagttcggaattagagtttgcaccacattttattataaatggtgaggacgagcctgtattaaattggagtacattccactgtgcaacgtcagtttcagatccagagcccagatctgttgatggcttgcgaccatgagaaatatcttgaatggggtcatcttcttcaggaattgactgtatgataacaaaataaaggatttgggcatcaaagaaaatcaatccaaattcattttcatcagtgcagttctttagcatatacctaagctatagtcacaaacagcaaagtaatcaattttgttcaatttcagtattgatgattattcgaagtgttaccaactcggacaccagatgaaagaagttacgcatacactacactattttgcatacctcaaccaagtagtgagcatctgcaatgtgcctctgagcacatggatgatcaatttcaagaagcgaaggcatctgctctgttaattcattcagagaagtaagcatcgtttttttcttacttttgctcaagatgttcacggaagaaagccttattatatcctgtttaaataaagccttgaattattaataatatccaatcaatgcactaactttcaaaaatagatttgaacaataatataaaaaccttgatttgctttaatatgctatcaagtgaaataagagatgctaatcgtgcatcttca

SEQ ID NO: 4061 - DNA, 955 bp, Glycine max
tgcacaggcctaaacagcaagtagttttacctactcgtagctgctcaactagccccttgatgctaggggatctccgtgaagagtgaagatggttgccactaagtgggattttagtggcatcaagggaatcaaacccgcgcccgtatggagtatgagagttaattatactattaccatagttcaagtgttgttacttgttagcgtttgcctagttcagttacagattaattaattagactagttttgcaatgtcaatgaaaaagttaataaataaataaacaaaaatcgcagaaactgctattgaacaatagtaactgtagatagctacaaaaaattgcaattgccgagaaacaggctgttaccaagccggtgctgcgatacaacggtagcacattccttgttttttgttctctgctgcggaatactcgtcttcagatcttcaattcttcccttcacagaatcaatcgcggctttcaacgccattcgcttcgcctctctccgagtcttaactgcacgaaaagtaaaacacaacaccaaaccaaaacactgtaaaaagaaaaattcaaattaaaaaaaaaataaaaagcaaacaaaacagaatttaagtgaaaaaagagagagatataagtgtgagtgcctgcaagtgcctttaccaaatcatcctcagcctctctgagtttagcttgaatctctgttagttcggctgcaaaagaaaaagagaaagattaagaagaacgttggagagtgtaaaccctaagttactgattggaaagtgcggagtggaaagtgtgacattgagatcgcgcggtttcgagtgcggtggttctcagtgattggagagagtttctgtaagaagcggtgagagcgtcgatgttctgtagtcgaagagggatatcggtgtcgcagattgacgccatcttcgttcgttcgcactctctccgtttcactttgcctt

SEQ ID NO: 4062 - DNA, 1229 bp, Glycine max
ttgcatgcctgcaggcctcggagacggtggttccgtcggggatggtgagcgccttagacaaccgaagcttcttaacggttctttctccgccatcatccctaacggaagaaaaaaggttggatttaaaaagaaaaaggaaaaatagagggaaagaggaaggtggtttacatacggagggttgattccgttacgggcggggagggagagggacttcttttgatggcgtttggtctttttgttgatggaggaagtttcagtgctgctcattcttcttcttctctctgtgtttcgatgaatgaatgttaatcagatttcgcgcttaatttttttctgtgtgaatgtgccaaatttttatgatcctctttctctctctctcttcttcatgtcaaatcacgacacagaggaggttagggttctgcggggccctctctcttccgtcagctagaaattaagatatatatatatatatatatatatatatatatttttttttttttatttttttttttttcctttcttttgttttttcctaccactgagaggttcatattgttttcggttactagatagacaagaattatttaatcgatcaataaatgctgtggtcgctttatttattttaataaaaatcaatttaatcaactgtttgtccttaatattttagagtttgatatctatatattgtgggtcacaaatcactttttttaaattttcaaaataattattttaaaaattagtaaatttatcatatttataataaattatagatgaataatcgtataaatttttttacgctattattagtgtataatctttttttatcttttttataaaaaaattaataattaaaaatttaagtaaattagatcccaaaacttatcaagaataaaacaaacattaaaactcaaaaaaatacttataaattacctacaaataacgtataaataacaaaaagcaaattcacttcttttaaggtataaattggttctttaccgactcgaggttgattctcatctttttatacttgtttatactttgtatttgtagtttagtttatatatctaaaagtattacgttttatgctttgtttggaagaaagaaaacaataaaaaaaattgttttaatgacattagggaattaattctaaattctctaaaattgtcacagaatttgtataaaattgctaaaagtataaaatttagcagttttgcactatcagttttaatttt

SEQ ID NO: 4063 - DNA, 1171 bp, Glycine max
atctagtaccctgccttttctccaacccatttatttttttgaagacacatgatgtctagaaaaatgtgagggccctttctcatttatcaccttttgagtgtcaatgcagtgactctatctcagttaagtgattatcactatactcatgctatacagcacattacttccagttaaaacctagaattaacacacataatccatcgtgagctcagttccttacaacagagaaagttctcaatgaacccaaaatcatcagtagaaatagcaaaagcaaaatgtgttgaaatcaattacagcggaatagagattatgaaaagaagaaaaaatgcccacttccactaccccaaaatcctcagatacctgcctcaagttccaattccttgcctgtataattaataataataattgtcatattctcttcctccaatcttctctagtcgggtatcacatttgctagtcttagaatttggatttgtgcctaattaaaccccacaaaaccagcttgtaaggtgaagactgtccaagctttataagctttatttaagccatatctctagtcaatgtgggactaaattaccacccttgagctgcaattaaggcagcccccaaagcaaccgcaactgagcttggataggggtgaccacaattaagcttggctttccaacaattaggcaattccctaactcttcttaccattttctccactctttcaccccctttttcctcctcttctctacacaccaacagacttttactactgttaggaccatttttatctttctttcctctcccatgtatcttgatcagcagcccatcagaactcaattaaattaaaatacaactcaggcagaacaaaaaatctgaatattatttggacagtgaggtctctcccaagtttgtctatgtttgactgctgaacttatggagattaacataaatgatctggtacagttgcgagggacacacaaagctttgctctttacaattgtgtaattttatgtcagagttcagcttcccacacacccatttcctcttgcattgtgaattgggttggcaattttgaacaaatatttgctatttctacgaattttttttcttcttttgcccctatacttgtggggactttttctccatacaatatccatgatttggaaaagaaaggattaaaaag

SEQ ID NO: 4064 - DNA, 999 bp, Glycine max
gcttgcatgcctgcagggcatgtaaccagcacaacatgtgtatctggagtaaacaaaagataaccatataagttatcacacattaatttaaaccatataattcatttttgaaatctgggagaacttgtacagaatcagttattaccttgacatatcatcgtaaagagctcgtttgcggagcagatatgatacacacggtgcactgtcacgtgacaacagaaaattaacatgaaaaatacaagaaataattacattttatgccgtgaataaattccattaaaattatgattcaactaacaaggcattggagacgcaaaacaccaaaatgtaaggtccatgaaattttgtatgaagaatgcattctcataaaaaagatagacacaaaagcacctcaaaagacacacagtaacactgtttccgatattaaatgttgcccaaaaggctcgctgtataaaattaatcctttgggggggtcaaattccttctcaggcaatcatttccgaaagttggttagaactcaaccataatttgttacctcaaaatgtcaaatataaataaccaaccaaatagaaattagaaaagatgcagaaattcgatagtgaggataagtcaacgcaagtcaactttgatccatgacttaaaaattgcaagcaggaaggtggagaagacttaccaccacagagaaaagcaacaatctgcatataattgaaaagattgagaaacaatgttagatactatagtccatatatataatctgcgtgggtgtttgcaaagtgcaattgcaagttagaacttacaaggggtgtcagcttgaattgtactcaaaagatcagagtgccagagattgcggaagttctggcggagctgcatcttctcgatgtgttgttgtgaggccatttccttcccctgtttcaggaattatgaaaaccctaacaacaacaagtgttacaaccaaatcgaaccacgatgaatatataaggaaagacaagtaagaaaaaa

SEQ ID NO: 4065 - DNA, 987 bp, Glycine max
acacgtgcatgttatgtgcaatgtccacctgtttcactctcaaaagcacgggactatcggttctgcaacgtaggcaaaaggcaaaatcctgccagctacgagctaataaacgtttgcatgcatgcaagtgaaataccaattgactgaatttaaaacgttacttgaacacatagagtactagaccgtttacttctggattttttcacagaaattaaaaaaatagtaatgaaattaaatttaattagctttaattaatattatatttttggaaattaagccaaaatgttctctttacaaataattttggaggcaccgtttctaaaaataataacacaatatattttcagtaatggatttctcttcttattccttcattattttgttccttttcttttccctctcaagtatatcctccaaatatcctttagatttgacttttaaatcaacttatatttgcccattcaacaaggttttcatgcatctacagtgcgttcccatcttgaaccgtccccaagaatatcggttggaaaattatgtatgggacactattatataatagtcgacatttaatgacaagaaatgaagagataggaaagtgataaatgttactactataatttagaaaaaaaatatagatattactaaatgtttataatgttaaaatgttcacatatatggtagtaattatccatttcggttccagtttaagttactttgccaatggcagttgactcttcaataaatctattgactcaaagtatgcgttattttgtataatcactatttgtcaattaaagtgaaacaactatgacatcttattaaggatatatttggtttaaaaaataaaaataaaagataaattttttaattaaaataaaatgtaaaaaatgtggatttaaaaaaatttacaaaatttctttttaatattatttctcttctttctaccaaatatgtcataatcatggaaagcagactttcaattttctt

SEQ ID NO: 4066 - DNA, 1084 bp, Glycine max
aaaattcaggtaatcaataaaataattagttctgttcatacaaaattaaaactaaagtgctcgttttccttccgcaatcaaaaagtttaagataagatcgctaatccatggacaaacaaacctagtaatatccttgcaaaaattaaaagagataattaatgaactaattatcaatgatatgtcactaaaactgaatttgattttactagttaatcatacaacatttcccttgttgttgtgatctgttcatcaataacatcaacttatgattcatcaataataagagggcctactattaacaacacagagaacacatgttttttccaacaaaaccgaaatttcattttgattatttaacacaacagaacaaatcatactctggtggcatgtatccaaatgttcccacaagacgagtttgaagtgtggaacctccaacttcaataagtttggtcaaaccaaaatctgcaacctgtatttaaaagcagacatggtttagtctcaaaacagaaatggaaaataatgatttgaagaaaggatcaggaagaatggtaacaatgcaacctttccacggaagtttttgtctattaatatatttgcagattttacatcacgatggatatacactggcacagtgtgctcgtgaatatattcaaggcctcttgctgaatctagtgcaatttgcactcggctagaccataggaaaggatctttccctggaatcatgttatcatcattattcattgtttgacaataaggtaacatgaaacatcataggaaaaatatcataaatacatgctgttctcacctgtaccatgcaaatattggcctaagtttccattgtcaatatattcatatacaaggaaaagagacccctcaacacaatatccaatcaagcgcacctgtattgttgttcacaaaaaggtagctatataaatacagaagaaggtattgaacttacatggaactgcttatgccaaaaaaataaactacattgacgctcacaatcaattacaggaataagatatagatatcacaagtttttttcacacaagtaatgctgatctcatgttaatttgcaggatta

SEQ ID NO: 4067 - DNA, 1248 bp, Glycine max
agaggtagtgggatagccaatttttaaattttccaaggcacttggatacttgagcttacattagtaagttttataaatcagttcatgctttagattcttagatcatttaaaatatgatatgaagaaccatactagaaggacacgacaaagagttagtctcagaatctcactctcatataaacaatttcaaagggaagaaaattcaagcacaagaaggacctcttttagaaactcatctttcttgttgattgcgtcttgatgcagaacctttacagctactggtgagtgatcaagattacacttgtaaactttcccatatcctccttcaccaattatcaagtcctcagcaaaaaagttcgttgctagcttgatttcatccatggtgtactttctgtatctcctgtcatttgagagcaatgtatccacaattctctgtttttctattgattctttaaggacatcaagttcagccatctgtctttcatatgactctttggaaaacttattttggcctcctcaagctccttcatgacttttaaatactttgttttctcttcagcaggcaactttctcaaaatctcctctctttttagggaagcattgactattttagtttcttcaagagattcagaagaaagtaaaagggcctgcaagtaaaaagggctaactcgtaaagacataaatttctctggttggagcataattactgtgaagtgccaaactcgaaactaaagatttaattcaagtccaatttgagcaactgtgccacaatgaagcagacatggctgtgatttttaaaaaactaaattttgaattaaaaaattgttgaaattaaagagtgcataagctatatgtttgaatataattgaaaccaattatttttcattttgttgacttcaaggctcttgatcaggttttagtcatccaaaattttatgtttaaaagtaattgataagcagcattatatgctcgcagggaaaatgatttgccttttcttttaacaaataatttgagttgatacctttcataggcattgacttaggcattgagaacgtggggggagggagggggataaaaagaaagtagcttagctgaattagagatccaaacatgtatttccttttacaaacaaaagagaactcaaatattatccaactctcacctcgttttgagcttgaaccagctctccacagacctgtttatacatggtgatagtattttgcaactccagctgcaggcatgcaagct

SEQ ID NO: 4068 - DNA, 1234 bp, Glycine max
gttgagtggacaatttatcatactttaaaataattagagaaattaatcagatggactaattaaaaaaaatacaagtatcttgaaaatttacttttcaaataattcttcagttcatgaactacttgtgcatctttaacaaaagaaacagcatagaagtcaactttgttatccactccaaatttgatgtcatcccaatccttctctgtagcaaatcaacacaaatattatatgtccttgggaaaccaacaaaaccttaatcctcacccagttgtcagtacccaaacatatggagaggcatgtagaagaaatggtttaaaattaaaagaaataatcaagtataggaataatgatccggaatctaaccagtgatggaaggaagtgttgcactttttcctctaacattcaaatgtctccttgacttgagctctcctccatcaacaacttcacatttcacagaatcctctgtcttagacttaaccaccaaagacatcataccacctacatcatacacaaatagtatacatcaaagacccggtattaactctttccaagataaataggatactaaagatattgtccaacaacagtaatgttaaatatataataaatacattatgtaaagcattgtctcttgttatcatagtcttctttagaaaaacataaatacatcttccaacagtttggttggatgattcatgttatgttgactgaaacttttatgagtaaattataatcaatgatttatggatctaacagaagcttgtgactctgcataagtaaggataagaaaaaaaatttaataacttaagatgaaattatttttgttcatgtaatggttcttttattctcaacccaaaaccatgttcataaaatctaacaactaatcatgattcagggaaatacaaacggatcaagatgcatagacaagttataacatatttgcaccagaaggccacaatgctacactgccttgaagactcatcccttaggtcataattttttcagagattaggtgacttgcccttgttacagtacacaaaattagctaaggttaaagaaaatcacaaaagaataaattagtcccatgtttggtggcttatcaacccacgagcataacaaattgtttatatttcaaacatttttaccaatcagttggttgccataccatcaacaagaagcatgtctcccacatccacatcattgacgaaatcgtcatagttcacactaacacaat

SEQ ID NO: 4069 - DNA, 1153 bp, Glycine max
atggaacacgaaattatagtagaatcatggtcctacgagggtagatttcgctagggttacgaggatggccaaagtgggtccaaaaggagcagttttgcatgcaagaatgcaccaccttacttaattaattgcaccttaatgtgggtctatttgcacacttacctttcacacgtgttatgaatagggccacctagcagactttgaactcactatgaatttcgagttccttcgcgcagtcatgatgaaactcaggtgctccaaattccttaaatttctcacactgcaattataacaacacaaacccaaattaatcatatagaaattcgacccagagatccattagcaattagtgcaaatctttttccaagaatttacaaaattaattaatcggtgaaattgaaagaaggggattcataatcttggaacgtaatttagttacaaacattcttgttccatgaaagaaattaaggttcttgatttagaataaacgcataattaattagtgtaacacccacgttggttattttcacacaatttaatattagaaaggttttataatatgtgtatacctgctggagatcgagatgcttgaatccatccatgtccacgacgatctttgcctaatcctggaaacaatcttgcaatcttcatctaaatcatatgcaaagaagaaaagaacgaaacaattaaaatagaatgagtttgtgtgtacctgagaaatgtacctctcttcccctctcctccctcgtctccactcagaaaatagagcaagggaccgtcctataccctgtagaattcacctgttcatttattttggaaggctgatgtgtatgcttgatttgatattttgatagaaccggtatcttaacagcgagaaagaatgagttttttatttaatgaaactagggagaagctccttgggaactaatacactgctttggatccactccttacaccgctttctcagtttccaaaagtcccctatactgattacactttccagttattcctatttataggcagcggttggtttgcagacataagcacacccttaatgggcttaatcagttgcatgcctggtccacttcttgactaacaaaactaaaacccacaaataggaatgatacctgaaataagtagggccatgaatgga

SEQ ID NO: 4070 - DNA, 1141 bp, Glycine max
ttgcatgctttgcagaaagcacggtgagaagaagtggaaatgtgacaagtgctccaagaagtatgcagttcaatcagattggaaagctcactccaaaacctgtggcactagggagtacagatgtgactgtggaaccctcttctcaaggtaactaacctaaatccatttgtattacatacaagtccagtttagttaagacacatcaataatattcatttatggaggatgggatttcaatattcttaggttgactaagatgaattcacaaaagtaatttttttttctattccaattccattaataatataagatgagaaatcaactaaaaataactctttagagttatttctcatttttatcatttattttcttaaaatgaaattttaagagttatctttattataagttaatctcttgtcatagttataatatatactttttacacattccttatattccttcttacaagatgatatgcactgaggagacattaaattcattacattgatatagcagtttctcataatccctccctagagagagtggacattcctagtatggaattttttttaatggaatatctacatgtctttaaagaatgttgaaaagtaagagagaggatgagagtgagaaagtcaataattctacactactgtcacaacagttttttaataacatttgttggttttgtaattttgtttgttcatggtacttttttttccaggagggacagtttcataacccacagagctttctgtgatgcattagcagaggagagtgcaagagccatcacaaacccacttcttcccccacaacaacaacaacaacaaccttcttcttcctctcaccaccaaatgagtactctccaaacccaattcaaccctcaaaataacctccatgccttcccattgaaaaaagagcagcaaagtttcaatgttaggacagaaatgcccccttggcttggcccaccagctgcaacagtagttgttgatcatcaccatcatcatctctcctcatcatcctcatccataatgttctctcctcctcaccaggaaaaccctaatcctaaccctagccttggtcccactcttgctgcctacaaaacagtcgctaaccccccacacatgtcagccacagcatt

SEQ ID NO: 4071 - DNA, 1189 bp, Glycine max
tgttgatcaagttcagggccaagcactagctgcattgcaagttttaaaggtagttatttgttcttattctcatgtatcaaggtgactataatgctctgtgcatttatagtttaattctagtttttacgtatatatttacactggttatttcttaaatctatttaattactcacaataaaaaaagatgacccggagtacaaggttcctgggaagggtagagcctatttccaggatttgaacccatgacctctaggtcacaagatagcaatgtcactgttgcaccaaggctccccccccctctcccagtgggcatactagcttaaacttcagccatcttgattcactgtgatttgtactaagccatactctaacctattgccaaagattttctacaaggaacaatctatcttactgttgaagtaactaaaatcaataatttctgctagccttatgcttgttcccaggtcaactatttgcaaagcaagatatatgtaattaaagaactactgaaagatacacatgaaaacatattcttcataaacatatctctgatttagtgtggatatttgttaatatatattattctgatcataagtaaaggttgctattgttcacttggacattattacatccttaggtcattgagcctgatgttcaacctagtgatttatgtacacgtcgtgaatatgctcgctggttggtttctgctagcagtgctctttcaaggtagtaatttgtctctaccttctgcatatgtgaataacaaaatgtgttacatgtgtaatatttggcattacatgtgcctttctggtaacttgttaggagcacagtttcaaaagtgtatcctgccatgtatatagacaatgctactgagcttgcatttgatgatgtcactcccgaggaccctgatttttcttccattcaaggtcagtacaggacatcataataatttttaacaatacaacttgttgctatactcatattctgtctaaataatatcaaatattgattttcaggcttggcagaagctggacttattgaaagcaggctttcaagacgtgatatacagttgtttggtgatggagatgatagcccatttcacttctcccctgaaaggtatgttttgtctgaatttggatatctaatttgtggctacatttttttaacctctgcaggtcgactctagagg

SEQ ID NO: 4072 - DNA, 1080 bp, Glycine max
aagcattgcaaatacattctcctggtcttctttactaatgtggacaacatcaagagcttcctggaagttggcaatagtatattcaattttgtgtcaaactatcatttcaaaatcaatcagtccaatcaagcagaagtaagtaatcatttaagagtctatgaaggcagatcatctttaaactacaaagatagtgtaccatgactgtacgaaattcttctgcatcattaacaccagtaattgaataacaattgctctgcctcagataattatagtcttctgcattttgtaggtttagcttccctgaattacaaatcaaacaaacaatgaaatagaaagtcaaatagacaagaacacagaacattaaatgttacagacaagatgaacacgagaatacaaagcttatgtaaggcaatgttctaatttctaattattttgataacgctatcagtattcttgtaactaacgagatcaaaatgcctaattgaaaacataaaataaaagttattgaattaacaattaagcaagagggaactaggtacatgtttgggtttggtagtaaaaagtttattctaaaatgattcttatcaaacaatttatttttatcagcgaaaatatgtattatatattatatatactgtaaataaagctgtatagcaccagcggtgctggtatacacagcccttaggcatcccacctcacaaaatccagagaatcttaacaaatacatttgagatgtataatagaaagattctttggatttgtcactgagtgaaagcccccacctcaaaaaatattcccacaacaaaaaattacccctgtttcttttctaccgcactcctccccttacaaaattcattctagcattactactccatacttggaatgggacattaaaaccattttccagtgccttcatccacaaccaaatgaagaacattgcatcattcagtactgtttccccttggaattcccggttgttaaaattgcacttgttcctatgacgccaaatacaccatgttacagcagcccacaacaccatccacctctgcccatcaattctgccgctttcacagtaccaat

SEQ ID NO: 4073 - DNA, 996 bp, Glycine max
attggtactgtgaaagcggcagagttgatgggcagaggtggatggtgttgtgggctgctgtaacatgatgtatttgacgtcataggaacaagtgcatttttaacaatcgggaattccaaggggaaacagtactagatgatgcaatgttcttcatttggtcgtggatgaaggcactggaaaagggttttaatgtcccattccaagtatggagtagtaatgctagaatgaattttgtaaggggaggagtggagtagaaagcaacaggggaaattttttgttgtgggaatattttgaggtgggagctttcactcggtgacaaatccaaagaatctttctattatacatctcaaatgtatttgtgaagattctctggatttcgtgaggggggatgcctaagggctgtgtataccagcactgctggtgctatacagttttacttatagtatatataatataatacatatttttgctgatagaaaaaaaataacatttatgatcaaccaaatgaattttgttaattcccaggaatcatgattcttgggatttatgatttccaagaatcataattcttgggcatgaaaaaacttctcccctaccaaaccccccaatgttcgagacggggacaattaaatttaagtttttgaggaggataaaatgtttggaaggattgaaaaagaatggaacagaaaatgtctttagcgccagtgtgacatcaaaatgaaaaatgatgaaagtctttgtgaggtggagattcttgatgatatggaagacaaaaaaattatttgtaacaggtaggaattctttcttgatgacatcgaattcttgatgaaagccttttttatttgaagtgcactacttaatagaattaatagtagtgacatgttgtaggttcataggttgcatatggttgtttcctatgacacatgtataatcgatggtgcttgcttggattctgttcctcacctcatctttacattatttactgcaggcatgcaa

SEQ ID NO: 4074 - DNA, 1119 bp, Glycine max
aggaaggggaggactacaatatgcccccatatgctttcacagcttcactacgttaaacactaaacagcgaaagctcaaatcatgagaaaacacaaaaaacataagttaaagaagaagaaaaatagtaaatcgatcataatatacatatgttattcagcagcctgatgatttcagttctgggtcatccttcccttaatcaaaatagtaaattgaggccaaacaaatcaagacatccgtaagaataagattgaacacatcataaacaaacttcggagcaaataaaccccaaacctgcaaaaattattaagcattgagcaaactgtactagcataaaatattagtagttgtaatacataatatttagtaaaagatagcaaatttaccatcaggtggtgccgcctttgaattgtgacacataatattgtgaaagtagttgtaattgctgtcatgagcccatacgttgtatacatctatctaaaacattattacattgaacaagcaattcattcaatgatcaactagtggatctactaacaaatggaggaaactcacttgagacaattgtgtgaaaataaaatgctttccgagattagcctggtacttggttgccacaagaagtgggagtccaaatactggaaggatgatagaaaaaccaaatgtatcgatggcaaggaggattgcttggcgaacaagcacaaattcttcaaacctgaaaattaaccaatgtctcaatgatttgatttaccaattgaacagtaatagtaatgacagaaaaaaaaaaaaaaaaacctttaaaagccaatgaccgatttctccaataaaaacaaatttaatatagggctgattgtaatggtcacatttgtttaatagttccaatatctggtctaactagtagctcaaatgtttgttatataagcatgctaataattatttaccctataaatgcagcaccatagcggagaccatcaaatgcacacctgaaatcaaaattttcaaaatctatcataagaccaagggaatgcaggactgagaaagttgcaaagtcatacacaacctataaaaaatgataattataactccaaaaattaaaccttgaaagttacatgcataccagtgacc

SEQ ID NO: 4075 - DNA, 822 bp, Glycine max
gtagtcagaaggcaacttaatagaagcgctgaaatatccgtgaaggtaaagatcatgcgacacaaatcctgaacctgcaaacacaccccagaaatgcgaaaaaaaaaggtgaagactttagccacagaaatcaccatctcaacaaccccacatagattgtcaagccaaaaacaaaagctagcaaaaaaacaaaaaacaaaaaaaaaaaaacctgttctctcatcgagtgaaagatgaaccgatttgccatccctatggatgaccaagttgctgtccccaaacaagggcgcgtagccttcatcaaagggtattatgggcaagtttctggaggaggcagcagcgaaggcagcaaaaagcatggaagaacaaaagaagagcaacaaccccatgtgagacccctccatgattatgtgtttcctcagaaaaagataatatgaggagtggagcaaggaagagtaatgaagaagaagaagaagaagaagaagaagaaggagcaaaaaggggatgagagaaagagagaggtttggaataatctgtattctctacagctagaagcgatagagagagccgaaaggagcttgttagagagaaagacaggcaaacgaagcttatttgtattggtgagagtgtgttgagctgtgtccgaatgtagacaaatactagagtctttattttcttttaattgaaactctccttttcattgataagcaattggggaatattaaatgtatgtggaaaatgagaaatacgttagaaattgtacaacaagctctcagctgtaaatgatttattggaattttattctctctttgttggggggga

SEQ ID NO: 4076 - DNA, 851 bp, Glycine max
  misc_feature (663)..(663): n is a, c, g, or t
acgaacaattttctgagtccaaattaattttctgattcagttcattaatttattatttattttacttttttgcaaaaatgataaagagggtgaaagaaattagcgtggcttaaggcagaaggggacagagaggatatgttaacattagaaacagagccgcgtgttgaagcctttgtcaacaagtctttgtactaatcgaaaacaaaccagaaaaatacattacacaccaacaaagagagaataaaataccaataaatcatttacagctgagagcttgttgtacaattctaacgtatttctcattttccacatacatttaatattccccaattgcttatcaatgaaaaggagagtttcaattaaaagaaaataaagactctagtatttgtctacattcggacacagctcaacacactctcaccaatacaaataagcttcgtttgcctgtctttctctctaacaagctcctttcggctctctctatcgcttctagctgtagagaatacagattattccaaacctctctctttctctcatcccctttttgctccttcttcttcttcttcttcttcttcttcttcattactcttccttgctccactcctcatattatctttttctgaggaaacacataatcatggaggggtctcacatgggggttgntgctcttcttttgttcttccatgctttttgctgccttcgctgctgcctcctccagaaacttgcccataataccctttgatgaaggctacgcgcccttgtttggggaccagcaacttggtcatccatagggatggcaaatcggttcatcttttactcgatgagagaacaggttttttttttttggtttt

SEQ ID NO: 4077 - DNA, 1098 bp, Glycine max
ttcgccagcttgcatgcctgcagtttggatctagttgaagatgatgttcatattattaaacatccatcttcaaatatcatatcttctccaatgagtaatcttacaaagttggaagaaactctttctatttttgcagatccttgtgagaaagagatgatagtcaatgaggcaggaagtagagaatctttgacagaattagcagcacagaaggtagaggatcaacctgaaattacttctattgatgtacagttgaacatgaacagatcagttccatgtgatccttcggattttggaatgtggaataatacgcagcattcatctcttaaggagaaaatccagtatagctcttctatcaatgacctgaaaacagtgcctgtatgttctgagctagacacgcaaaggttatctggccagggaattaatccaacaaagcatgtaatggatccattaaaacctcttattcctgagttcttacccaaggcatctaaaaacagtcttgaggagatgccacctatgccccctctgcctccaatgcaatggagaacaggcaaggttcaacatgcttccctttttacacagagagaagacatagaagtaaacctagcctcactccaaccaatacagcccaataaacttgatgatatttctcaatttggtttaccaacttctgaaaaagagaccttgccgtatcagaatctatttttgcctgtcatggctgtggaaagtaatatgcatcaatattcttctgggttttcagtgggaatgtcagagcagcctgttgctattccttttcaacttcctgtaatggtaaatgaagcaaatggtcaatataatttcctagttccagaacaaagccaaatccagaaccctttcttatcattacaggacaggcctccacttggatatgctgttgctttggagggagaaaaggtattaaatccaagtccatgcccaccatcacttcttgctgaatgtgttgtttctagggctgatcccattttacaacaagaaaaaccaactcaatctccaagtgaattaacggaagttaccagcttagaagttacaaaggatagacctgaagaattgcatttagttcta

SEQ ID NO: 4078 - DNA, 1164 bp, Glycine max
aatgttggtcgttaacagtatcatgaaatttaggagtaggctgaatgcttggcagattctggtagttgacagggctatgataactatgtgatgaatcagattctggtccaggactggaaacagtagtttcggtggtcccaaggtcctgcaagaatcaacagctcaatgttaattgtttatatttattagtgaatttatttatatgtttttctaactgataaaacccagaagacaccaggttaagttttgaatcatacatatctatcacttgaagaactcaaaggaactgagaggtcctcatcaccgtcagggggtccagcagtgggcttccttccttctttcaaggcttttcttatttcagctgctttccacactgcatatttctgtttctgctccagctgtaaaagaaactcaaaaaagcattaaacatacagttacaggaagttgtattcctgctgcaaattgtttccaaataagaaaggctttgtggaaaacatgcaaatacaatgagacatgcataaaaaaggaaggttcaattcaatgcatgaaatacacacatcaggctgaactgctccaaattgattaagaatctcaaaaaagatgctggcagcataaaatgttttcgctgtattcctgcaaagtgtcaaagaatatacgttaaaaacttatcacagatgaaaaaatcttacaagcaagatagttatgcaaagggaatatagaaaatgtttggcaaaaaatagatactcggtatgtaaagagagtgagctactatcttgttcaagacaaaggaacaagaaggtacaaaaatcccttgtaaactttactgagaccatagggatcacagctgatgcaacagaaccagcatacaagcttaaaggcttatttatttatttatttcaagctagcattaaaaaaaaaaagttattttataatacaaatctgctcttccggcacgatcttgcttgtctgcttttccaaacacattcaaagcaaatccctcgagatataaattgtcttcaggccccaactggattgactttttatcctgtaaaaacaacatatttcggatacatcaattgagtaaataaaaattccataatcatacccaatcaaacatgccaaccactaacatctttcaaaggaaagaaaactgcaggcatgcaa

SEQ ID NO: 4079 - DNA, 1235 bp, Glycine max
atgtaaaaattagcggctgactccacttaaaatagtttaatctctgagggtttggccgaaaaagcatgcaatttactgatctcactgactcactcaccaattttgccgtgtaaatacagctagcctggcctaataaacgtaatgtattccttttggtcctttttcttcttttggaagagtagtaggggcttttggagagataggtgggctatcaattcttgaagacaagtccagggttgtatggctagtgtgaggacaagcattccctccttcagctcccattttaagctttgtcctcttctcaatttgatggcaccaccagacttatcattatgattttaaatagtgttctccaatcacaattgtaatgccaagatattttcacttattgtaatggccattgtgattacctcagttatatttttctataattatctgttataaaaagattttataactcatcataatctccattgtgaccgcaatttaaaatcaaacttcaaaaacaaaaaagagatgatctaattcgtgcaataaacaggccttagctttgagtcctttctcttgcattgttttgtagccaattaaaagaaccaccgctccctcttgatgatgtgttgtgccttcattcgctcatacaccaagaataattaatgctttggtgactaacttctccatctactccctttgtgcgtgtccttatacatatactactacttcctcttgaaaacaaaataaatttcgagcaacaaaaagcttctggtcaattcctcatgaattatgatcatttttttccatctcttcattctacctatagtgcttcctcacctttacccctactagccacccgtttataaatctacatgctagggttagggttattcaccaactattcgttaattgtatagacatagctagtgtgcgctattttatttactatatatctccacaaagctacctatctatctttcccgttttctgggtatgttttcggtgaaatgaagaactgaaaaaggatccatccaacgatccatcccaggttcagtgctaatcaacaatagaaatcgaaggaattgattagggtttggggaagatgaaaaagaggcaggtggtggtgaaacgagattacgccacgtcatcaccagcggtggggaatattcgatacggggagtgccagaagaatcatgcggcgaatacgggaggttatgctgtggagtgcgacaggcatgcaagct

SEQ ID NO: 4080 - DNA, 1251 bp, Glycine max
agacagcgcataaaataccttggaccagtaagttatttcaccacacataacgtcaaagatgagtaatgataaaggaataacttttcattccaaacacctcatcaacatctctcatttctctttatctctctttttctatcacatcataaatcctattatatatatattttttcttttttttctttctttttctaggtgtaagataatatataaggtgtctttcaaacatttttcttcactaaaattaataatacttgtaataattttgtagtgcaatggttgcatcaatgacaacatgtcttatttgacattggtattagtgaatttgaggcacaatagatttcacttgtaatgactttattttatgttttataaaagttttgctatgtcaacaaagttttctttgaattaaaagtttcaacggtgttgcttgaaatttgcaggaagagagggaagcatacgaagtgattgtggagggaggaaggcttgtttatagacaaagcagggaccttgtacatactacggaggattccaagtggatttttgtcctgagcacatctagaattttgtacgttgggcagaagaagaaaggtcaatttcagcactccagttttctagccggtggtgctaccattgcatccggaagattggttgctcaaaatggagttcttcatgtatgctaaatgttttatacgtatacgccattgataatttctattataattctgttattttgtcacaaaatgaaaaattcaaaagaaagaaattgaaaaacatatatgtcttgtaagaacaaatttcatcttaagaacgtgaaaactaaaaattaagttatcaaaattaaaaggttagtattcacaagattgcttaaaaaaaattgtgcatattgcttttaattttgactatttaaattgatctaatagtctatatttgttgttctcatttttttatcacaataaatagttctcaatttacatgcttctgcatttcatttcctttataactgaattgatcttcatttacattttatgcaggctatatggccctatagtggtcactaccgtccaacggagaagaacttcatggaattcattagcttcttggaggaacacaaagtggacatgacaaatgtaaaggtaaaccactttaaaaaacaatctttcccctatagatttgccaaattggccttcaatttaaaatcaatttgctgaacatatctttaacctttaagtaatttcacggatgttgtct

SEQ ID NO: 4081 - DNA, 989 bp, Glycine max
atgcacattagtattttatttatagtatggtatataaagattatgatcatagaaatcattgacataaaaaaacccagctcagtactagtgcacattaattaatgagtcttttgaaaaatcatttaaaaacaattgcgagtatctaaaattacaaaaagaataacggttaataaggtttgaaaatacaaaaagataatatttggtgcatttgcaaattgcaactccagaatccattctggaactcaaaactaatttgaagcagatgggatacaaaaggtttttaaaatgcattgtgggcactttgggcagaagcaactttttattactttagcccaaaatacagttaggccaagatgcagttggtctaatatatatatatatatatatatatagagagagagagagagagagggagagaggagggatcaagttacttcaagagaaactcttttaaagttactctccatcctcacacagttcattctcttgaaatctaatagttataatgagtaactaatcttaatcattagattttaaggaaatgaatggtgaagatgaggagtaactctcttagagttactcttgaagtaacttgattcctcttcatatatatatatatgacatagaagaccgacaacaggtcccaaaacaagccaaacaaaactctgctaatcataacaaaacacacaaagatacaatgagatttgcaatatacttacagagggaaataaataatcatgaggataaaccttcaacgagagcccattttcaaaataaaatgtgacagctggaaatccatcatcaacactgcaacataaaataaaataaccattacacccctacatgaagctgataatacagacataaatgcataggatatgcaaagggagaagtccagttatcgaagcactccaacaatacatactcaatacagaaatcaagacatctgcaacacggcaaaccaacaaagagcataaaacaataaacca

SEQ ID NO: 4082 - DNA, 1084 bp, Glycine max
aaataagaattgaatgtttgtttgattttcctttagaaagcttgaaatagatgttaaatccaatgatactagattcatggtttgagttgaacgtgttttgaaatgtgtgtcaactaaatatcaaacacacacttgggcatttgtgactatgataacaaatgcatcactgtacgagctagtatatgtgttgtatcaactatgtgtggaacaagaaggatatcgatccaaattagaaacatgaatggtagaagttggggacacacattaatgtgtatatatatatacacaaatagattgccacgtaccagaaggaaattgagttccttattttgctcctccaaaatcttgtcctgagcagtattatcaaaggaattaaacaagagtcagtattctttttttttatcatatatatatcaaaaacttttactccaaaagacatcatcatcattattatttacattatagaataatcaaatgagaattataattgattattgtaaaaaaaaaataggaatcataagtaacaaccaataactttatggttataaatacatatcatgttttatatttaaacactaattaactgttaatctttatcgttaataatatatacacacacagtggaaaaaagagccacgtacatttctcttgaacatcctgtgcacttccatctgtggcacaaacaagaaattaaggtctgaggttaaactcttgtttaagttttgctaacccaataataaagctatatatgatgataagtatattaaaaataattgcctttttctcacggactccactgaggccattttcaagggcatcctctagagccatcagttccttgtaattcagtgacgtgatgtcctctcctttcaagtgcctgaaacgtatacacttgacttgatcagaaaaataagagatcatgctgttggatatatatatatatatatatatagctagaacaaggtgcatcaatgtttatatttacatatatacctgagctcaatttgcatgctgtcattctctttcttgattctatcaatttcattgctgaggttctgcaggcatgcaagctggcgataaacat

SEQ ID NO: 4083 - DNA, 1028 bp, Glycine max
atgttatcgccagcttgcatgcctgcagaggatgagattgcagactctgtatttgtgcaggtaacttgccttgttatcattaaataaatttcaaaacctgatctaaatcaccaacatgggagttattccctcgagtctaactgacttgactcggttgtgacttgcctttaatcttgttgtgttcttcaagtttcggtcttagaaatcacagatcttgctttaatatatttcttgggtttgtgttccttttcttgagtcttagaaacatcagttccgaatttcattttgtaagccctatttcaagtttttccttggatatgaactgtgaatctgtgataccatattagaatttatgtgtgaaccatatcttagaatgttatagccaagtagcctgtttgttcaaagataccttgacactttggactcatggccctcttgctcttaactcactaacgtgggacatgttctccaacactccactagtttgttaatatataatggaattataaaattcgttctttattcttatttaactctccattcccttattttcttttcaaagcatatgtgatattgattttaattatttttgtttttatattttgaagaactgaaatggtgttcagatttggtcatccagagcactatctttgtggtctgtttagcacatttatcttttctctcttttcttacatatttaatttcttgaaatcttgttacagtcctatattccgaagacactagaggatgtgaagaatgctgaggaggatgtacaacggataacaagtgggaaggacaccaaagatttatactatcagaccattactggacttaaacatgctctgtcattaacacagccttcccagcaaaaaacccaacagaaatcaagtcccacaaaggattcaccggctgtttctgatgataaatctaaactcttagaggatgatgctgagggtcaatctgacgaggatgaagatgatgaaagcaattctgaagaggattcaccctcagaaagtgaagtagatgat

SEQ ID NO: 4084 - DNA, 1096 bp, Glycine max
aaactatgacaaccaccaaatccgatattagcctgcatgattgagcaattattcaagggttgatcaaatctcatggtagaaaataaatagaacaaaattcaaaaactaaaaaaaaaaaattcaagaatgacaaaatacaaaggcatcactgtctaatattatcataaattcataattataatttttgaaaaaaagaaatgatacttgttggaaagcaagatatcctttgaaatctaaaagccatcgataccaggcccctcaattttcagcacacaaaaacagtttaaacttgaaagtatttggtaaaacctccaagagcaagtaaagaaatatctaaaaccatttatttttccacatggaaaaagagaaaagcacaggaagaggaaaacaagatgattcatttgtcattttcacaattatatctttgaaaactacttgatttctaacactgatacatcattaaaataacaaattccataatccaacaatacagattcattaacaaaagaaatcaactcagaaacatagcatttgtccaagttttaagcaacttcttaacacaatcagtatgcttcagttagtcaaccaagctgataaagaattccctgtgtagtaattacaaggacaaaaattataacagatgtcaaacctcaaatccacttgaagcacaggatatttggatttcttgtttgacatcacaaagacattgtcctgccatgcaatagcataaacaagtaagcaggttgaaacatgaataaaagtagtatataacatatatcatcgaagaaaatcccagaggcttcagatcttttagcacacctttttgtcaatcaaagttgtcacatcatcagaatcttcattttccagtgagaacacatcttgaaactgaaatgctcttgtggcactgaggaaaaaaaccatttaagaagaataaaaaattattcagtatataaataaagttacatccaataatccattataagatgcaactgagaaactacatcggggaacatatgagtataaccatactttccctcatgtgtttcatttctctttgctttatcatgagtaattttagctacagtctccaatacag

SEQ ID NO: 4085 - DNA, 981 bp, Glycine max
agccaaagacattttcagtgagtgttgatatcttctgttttttcctcattgtttgttggtttgaggttacattggaatatataacttctggtattggtttagaacgggatttatgtttatatttatataattgctaggttaaatgtggagtaaggggtaacactggtccagcctgcaatgtggttggaatgattgatcgaatgatattgggtatacaacacctgtacaagagaccaatatatgcgcggatgcctgtatgatcctctcttaagatttgcttatccaatatgatagatagttcttgttgcttttcatttttttacaaatacgttagcttttttcttttccttttatcatcatcaataggaatgcagtattaattctcccaactatggaccattacctcctgatgctcctgcttggtgtcaggccccttttgatcctgaaggactcctaaggtgagctcactttgtcactctcaaatctcaatgagagggtaaagaggaaaaacaatgaccaatacttgaatatgaaatttatttcgcaaaaacgagtgcttttccttgtccctaattttgtgttgcattgtggatttatagttcagtgatggctattgtcacctgcttgattgggttgcactatggacatattattgtccattttaaggtaatactttgtcatctcttatctttttttttttttttttcctgttttgcttataagttactcacttatttccttgttgctgcatgcaggaccacagagtgagaatcatatactggatgatcccaacctcttgtcttttagtttttggccttgcgttggacttatttggtatgcattctttttaactgtttcttgcacaggaccattgttccactggcatttatattgtttgtagatattgacatggttcttcttgtaggaatgcatataaataaggttctctactcgctcagttacacatgtgtcactgctggt

SEQ ID NO: 4086 - DNA, 1222 bp, Glycine max
tagatctgcactcgtgaatgataacattgttgaattaaggattttgatgcttgatgcttgatgcttgactatgagagagaatactattgaaaattgaagtgaatacttagaagaagttcatggccttggaatggaatgatcatgtgaacctcattacctgccgacttggcactgcatatatggatctaattcaagtccttttcatcctcctaaatgcctgtcccttcttctttagttctgatcctcaacttatccacattagctttctttttctagtatttacaaggattgctaaaattaattttatttgtaataataaaaatgtttattattgttgtctataattattaataaatacaattactcgttttagtgtacatatttcttatttctatataccctttaatatattaattattttcttcataaaccttcaagatgtaactgttctaatttttttctaaaaaaactgttatcaatactttctttaattgtttcccttttttaaaataaagatagaagcatgaagtgtctcattttcaattatttaaataaacaatactttagttagacacaagttcgaactataagtttcccataattttgctccattatatcctacaatttttgtgaaatatatatattcttacaagataatattacgcacaacttttcatcaaaatgttacaaacaactcgagcattttaggacattttttttcaagtaaatcccaggccgaataatcatcaacctatgttacattcacccccaacataaaaactaacgggggaagatatctattgttagtctgtacatttgttagtgcctgatctctctcgcctacacagtcgcttgttcttttaaaaaaaaccagttagtcaccgtttattggtcttctccttgcctgcaaacaagtttgccttgtgtcagaattaagcattactatagagaagcataattttcttaaataagattactcaccaaatatagttgattttaaaggaaatcgaattgatgaacccttaaatctcagctcccgattatgcttgtttctattttgtttctcaatagcactggaactattgctagtttctccggtcagaaagtttgccactttacttaccttttcatggtacacagcaggtggggcaagcttcaatggaggcaagttttctatttgcataaatctctgattcttctgcaagctgctcaagatctggaa

SEQ ID NO: 4087 - DNA, 1125 bp, Glycine max
aattttccctgatggaggagaaaatgtatcagaacaaagagatatacctcctgccccagttcatccattccatccaaacatgaaaataagaagaggggtcttggccactgagtgtgcggatgcaatgcagcaattctttcagcttagaaggaaaaagaagaaagaggaaccgtcaaatgacccttctagccttcctgttactcaccacccctccaagttactcaacaagatacatgacgtcttccacatcatgttttgtttgtaaaagagaataatcacatattttcccatgttttaaatgagcttctaaataaaataatcaaacatgaatgaatgatcattgtgaaaagtacaatgctcaatttctttaagagtattcaatcagttaagctgtcaaagacaataatttcagacgttgcctactttaatttcaagtaatgacttcaaacgcttaggatgatgactagaatgtaatgatatagtaaagcctgtctgtcattgttccctttcatttttttttggaaagggtgattgggtgagaatttgagatcacttgcaagaaacagaaacctagtagagtatgtagaaagattgaattgctgatgaaacattacaatcacaatggtaagttgaaccatcaagtattaacagaaagtgatagagaccccgtacttacatataggtatgtgtagaaattagtaggtgaaattatgttctcattaacataaaacttttttttattcattccatccctccttgcctaatccacccaaccttttgtcctggcaaatatgaaaaataattaagtctacttaaaatacaagttaggccataaccataatattaactttgaatgtgtgaacctgtgataaaagtctaaatgaccaggactaatgattttcaagggtcccccttgatgcgaagtgaagctaaatctaactctactattttcctttgttaacgttactcgttagatgattaatatttaaatgatgtcacaatcacgtgaaggctacattcttccttccacagatagtccacaccatacgtttcaaccttgtgcttcacattagttcaaatataagaagcaaactctctgcattcaaaaccagatcacaacataca

SEQ ID NO: 4088 - DNA, 1095 bp, Glycine max
agcttgcatgcctgcagtcctccgtcttcccaaaactttactttgcgaaaaaatatctctgcacttcccttctgcacttcaccacgatctgtaatcaacacaataaagtagcaatagtcagagagtctgatagtaaaagttccaaccattgggataggataacattttattcaacataaaaactaatatattattaaatttttctagtgataataatgttcagttcattttcactccatccacccttctcaaaaacacttgcagattagaagcagccctatgtctgcattccattccgcagcatatattaatattttaaggttcaatctgcttgacctaggaaatctaaaattaaaagcagctacaacaaataggaaaaataagtctaggaaaatgaaacagagaaaaggtaaaaccataaccaccaactagattttgaactacggttcgagaaactccatggttagcaatagtgcaatcgctcctaaatttttaaaaacttaaagctaatacaaggataatattaaaaaaaaaaaacactttcgggagtgtgttataagtcagcatccaatacagatctcaacaattatcttctcttgaaatgcatttccacaaacagtttcctaactctaacgaatcaagatgcattcaattgagctcgagccaatgcaacaaaaggtgcaaatatctcaccgaaacacatcactgttcagatatttaaaaaagtaatcagctacgcaactttcgtgtttctcaatcttgccagggaagtaattaataatcacttagcacgctatcaagacgtgaatcaagtaagtaagatctggatgcgtgaactcgaattaccgattattgagttagaaataataatcttgctacagatcagtaagctaaactaaaacactctagctgaacacaaatccatcgaaacattggatcgaacaaacagcaccagatccaaaaacaaagaaaacaaaaatcgcgaagcaagagtgtgattcagagagaactaacagtctcgaaaaacgatgttatcgccacgctgcgacagaacgaagaattgcgagatcatggctccgctcgatgcacgcacct

SEQ ID NO: 4089 - DNA, 1128 bp, Glycine max
ccaacaagcaatctaaaccaatggacatgaacttcaactgaactatccaacttaaaagccccaactgaacgtacattcccatttgaattggatcttgtgcttcttacaaagtgtacaacatccaggccctcctttagtctgagaatggttactattctttccaggctggtaacaccacatataattgcaccaacaacaagtgcagaaacagcagcactaattttcgttgttcttgcaaccacaattttactaatgttgtttgcagcaacgtcgttcgaaatagtaccagtatcatgggtttcaggtgacatttgaaactgagctcgagatgctttacttggagcaaaaactccagcaagagcagtagaagcttccattgcaagtgcaatctcaaatacacggctttgacgttctcccaaggcttccttaagcaagcacaaacaagttatatgcattcgcagaatgcatttagcatagttcaatgaacttgtagccaatgacatatttgaatgattactgccagctgaaaaatcaggcaattttgctaatgttggaccaacactgccaactatggcagaaacagcagaagtaaccaaagaggggtccccttcttgagcagcaccaccagtctgccttatgcaatctatcaaacccataactatttgttttgcaatttgatatccattatcccatttttcaaaagcaggaccttttggtgtaccagcagcaaagagctttctgtcttttccaaaaagatcaagaaatgcttcttccacattacgctgtacaacatctctcatgcctgaacctactctggacgggaaccggccaccacttatcttttgacggaaaaagtcatcagggtcctcaactccagcaggcacaccaagtggaagccctaactctccatcaactgaccgtccagactctagttcagaagcaagtctcttatcacatgtactcttaaaacttttctcccactcaatgacactgaccacattgccatatttttttaataaataacgagcaaaagttagggcacctgaaccagaaaccctcccattagatgctgctataatagccgcagcacgatgcattatagatgacagagcttcaggaagaagatct

SEQ ID NO: 4090 - DNA, 1214 bp, Glycine max
cagctgcataactgatgatggttctgcaaaattccttgagaaaataatttgccctatttatcaaacgctagatgcagtgagttgctttattcaccctctttgtatattgcaatattatgtttcatatcttcaatttcttacaattttcgaataagttgatggtgacctaagggagctataaatagctatagtccttcatcattgtaacaattaattctcatttttcagaaatacaatatttcagttaaatattcattccctcaaatatctatcagttccattgaatctctcttctttccagtgttgtcaatagtggatcatggtaagccaaaatccaatatatagggtcggtttgtttaaactttattttattttttatataaaaaagtccttttttataaaagtgctttttaaaaagcagataggatttgcttattaaaaaaaagtagaaaactgttttttttttttaaagaaaaagcaatttaaacaaacacttcaaacaaccagaaaactgcttatttttattcaaatttttttttcttagaaataattttaaacaaatgggccctattggacaacttcgtgggctaatagtgacagttgcatagtggttgaaatatatatatatatatatatatatatatatatatatatatatattaaaacagaataataagaaataagaaaaaagacgaacaaaaaaaagcttaaaatttggaagaaacagaggtaaacaattagaggaaaaagaaaaatggaaagtttaaagaagaaatagcaaagagggggagattaaagaaaaagaagggaaaaaaaccattacctgagaggctgagttgctggagaatttctggagaggccgtggatgaaagaagttgatggaggaatgttgtcttttccttacaggtgatgtgtaattttcagttcttagtattcagatttcagagcttaacatggaggaactagtgacttgggagacgatatatgcacaggagacacttggggctggggattcaaaaagaaatagaacactgggcagcgattgaaaataaaaaaggaacctggagcccaaaacgaaatccagcttgggaattaaaagtgcacatgcagcacaaacccaacatgaatggcaatgctgcttgaaattaaaaaaaatcatgtcaaggtgcagctggaaattaaaaaactcgtgcaggacgcaggcagcaagctgg

SEQ ID NO: 4091 - DNA, 957 bp, Glycine max
gctttaggggccacgtaaagcatgttctagtgatatgaaaccttgagattatgtctctatttcgttcaatattcctgtttataactttattaaatagtactacatcataaatgagaccatgctacagttagtttgtcaattacctgtcttgtaccccgtagggatgacacacgttcggagctagggtgggaagtacctccctatccccgtctctattatttccctattcctattcctatcccctcattgttcttctgtccccatcctgattcccacttagggttaatttttttcccatccctgattccttgaaggtccttgtgggaccttgaaattgtaaatagtaataattataataaaggtattcaggtctcctttaacaaattcaaaattgcaaaaaatacatttatatattgtaatatatatatatatatatatatatagagagagagagagagagagagagagagagagagagagagagagagatggtgggggggacgcttgtcattttaagaatgtgagaataataaatcttgattataacatatatgggtgattaagatcaaaagttagtaatcacatgattatttaaaaaaatcatgtgcacttatcttataattttcactattcaaatagtaagatagagtcaatatttattatccatttctcacaataacaagcatctttacgtgaataagagtgatttttttattttaaatacatggagactccttggggtcggcagcatgatcccaaatatacttccaagtatctggataggttcacaaccattaaatttatgtattctgctgtgctacattttataattctttcaagatgagttgattgggaggaaagtttataaccttttttccttgtcatatattttttttttttgtttacatgttttattaccttcttgtaattgattcaatacaatgcaatttgtcattc

SEQ ID NO: 4092 - DNA, 1178 bp, Glycine max
tctcgggtagttgagtcttagtgagttagttaatgacaactaattacagctgtcatagctaacagctttgtctatataaacagatctgtactctggagttagttgggttaatgaaactaaagtttttttcctctttcattttctgttattaaaaatcttctctcaagattctattaacggacatacaagcactcgtaataataaactaaggaataatatggtagaatacttacatgtaaagattaatatgttctagcatatttatttcctatgacatggcaatgcctctcattatttgtcaaatttgtgcttctgggttttgattattttacactcaactagcttttcagtcagtttctttcttgaacaatttgattataagcttttgtcatactcatgaaagaaaaataagctaatccaaagatgtactaatgtgtaacatgatttccttatttgtcttcttactacagatacaaaccaagtgaggagacattaattcagatagatctcttttgctcaaccatgattgctgaatgtgatattaacccaactcagccgtggtcactagctttgaatcgacaatctggtgcatcaaatacatctcctttacctgtatctacctttgcctctgagtcccttgtaaagtcattaagttatgtgcgttccctagttgctcaacacattcctaaacggctttttcaaccagcttcatttgctggaccaccttcatcgggacagtcactaccgacattgtcatctttgctgagtaaatccttcaattcccaactaactcctgcaagtattccagaaacaccaagttctgcaagtgttccaaaaacactagagaaggattcaagtgctctatctgtttcaaggttatcaaaaatcgaaaaagctaatgaaacagatgaactagggttcattgctcatgatgttctaaaatggcgctggcttgaggaaccacagtcatcatctatagggactgaaaagtaataatctatgtttcatgttggtttaggtgtcttggtagtggccactgtagtttatatctctactttacctgttagttttttcccactgtagtttcagaaattgactttgttatttaacatttttaatgcagtgatcgagctgtgaattctcaagacatgacagcacatagtttcttagaaataggt

SEQ ID NO: 4093 - DNA, 1035 bp, Glycine max
attgatttgtattcctttttttttcttttaatagtcaaatgaaagaataaagaaaagacctcgagaagaaatgatgtgattagtgtgttaaatgcttcaattggaccagcagcaatttactgattactagcatgtttggtttcacatttcagatattgtttttcatgtttactaataagctaatacttatatgttattttatgaatataactatagcttcccctattttattaatttagttataacttccactgttataagctaataaaatccactattttatgaatataactaatagcttccacatcagatgtgactttttacttcgtaacaggttttcaaacacacatcagtacaacaactttcgttacggatacacatctttttcagaaatttgtttttctttttataacatctttttataatttttagatgcattaattattttttttctacatatccttacttaattattctctctttaaacattaataaaaaacaattaagtaaataaaaaaaataagaaaaaggatattttaaaatgatagtacaaatagttcacaaatttaatacgatttactaaattaagtatttttttttaaggaatatgaattagttaaaagattgtgagggacttagtatctggaacaaaagaacaccaataatagcataattaagtggttcccctgtacataaccattaggatattcatcacttaagcttgaaaagagtctttgaagttagtagtacctgtataagtggaatttgaagcctctgaagcagtgtcaagtttactgaggaatctcttgcgagttgaagaaatagttttcatgcgtgagttgatggcttttaactcatgcgcaatccgataacgagctttcatattcctgatactgagataattagagaatccatttgtatggttatgtacctggaccagttccaattcatcaagaagatcttcagcctcgtgaacaacatctctgacttgcctaacccaaactttgagttcctcatcagtctcttcaaatacat

SEQ ID NO: 4094 - DNA, 1156 bp, Glycine max
cgccaaacttgcatgtcctgcaggtttgagaggtttcctagttgatgagggattaatcccatgaacccacttaagctaaggtccaagtatctcagactcttcaatgagcctaggaagcttggtattggagtaagaacaaaataatttgaactcaagtccaaacgattcaaatattttagtccaagcaaagaaggactaatctctccgctcaactccctatagggagagcccgcaggtgtgtcaagattgatttccatgactttacctgtgttgttgcagtgaacccctggccatgtacagcaatccgatttgtcagaccatgatgaaagcctgtttgaagggtctgctagtccatgcttgaagctgaggagtgcattcctttccttctcactgcaagtcatattgagccttgctgccttgcttgcactgaagtggagagttgttgaagtggacaatatcaagagaagaacatgagttgcaaatagcactgccatgaagaagaaggaagaaggaagacgaaaaaggttgaatccacaattttctggttcacggttggtatttactactaacaatgcctatataggatatatagttatataccatagaagggtttgcatttaaaattttattccactaatggtggtggttgcaaaatgcacacatatgtagaggtatatatgtctacaaggagacatttaggattaaaagtgtctaaccacaccaccattattttgcactagtttattttattttgatttaactatccttttaatccttatagtttattttattgtgatttaatttttcttttagtccctatagtttaagacattcattttggttcctatatttacaattttttttatctttttgtcctcgcggggaagattcaactcacacataaacatgaacaaaattaataaaaatagggaagcaagctcaggtacaactgaagtgtaatggaggtatgagacaaaggcactacacattccattattcttgtgtctgccaccgacctctgcaagcttagcattttccaattgccatgatgtaatctccttctttactgtgtctcatcaagttggagtggtatcacagcattgaactaagttgaacgttccaatgggatgatggttttgattgctgcaggtcgact

SEQ ID NO: 4095 - DNA, 1021 bp, Glycine max
ttgcatgcctgcagggagtaaaggggttgcaggaagcaaaaagcatgagacccatgcagctggtataatcgtgaaggaagatatcatcgtgctttctagaagatatgtaggtagtggaataagggaatatggttgttaggatattccattttatcttttctgttttgcttgtggggccttgttccctgcataacagctatatatgtagatgaattaagcgcttttgatatcagaaaatataacagcaagttctcccttagtctctctcttcctcttcttctatggaggttcctagccctcgaaactaggtggttcacgttctcaagcttggttcctaacatgtggttagacacttttaatcctgaatgtctccttgtagacatatatacctctacatatgtgtgcattttgcaaccaccaccattagtggaataaaattttaaatgcaaacccttctatggtatatatcctatataggcattgttagtagtaaataccaaccgtgaaccagaaaattgtggattcaacctttttcgtcttccttcttcttcatggcagtgctatttgcaactcatgttcttctcttgatattgtccactgcaacaactctccacttcagtgcaagcaaggcagcaaggctcaatatgacttgcagcgagaaggaaaggaatgcactcctcagcttcaagcatggactagcagacccttcaaacaggctttcatcgtggtctgacaaatcggattgctgtacatggccaggggttcactgcaacaacacaggtaaagtcatggaaatcaatcttgacacacctgcgggctctccctatagggagttgagtggagagattagtccttctttgcttgaactaaaatatttgaatcgtttggacttgagttcaaattattttgttcttactccaataccaagcttcctaggctcattggagagtctgagatacttggaccttagcttaagtgggttcatgggattaatccctcatcaactaggaaacctctcaaa

SEQ ID NO: 4096 - DNA, 847 bp, Glycine max
  misc_feature (739)..(739): n is a, c, g, or t
tttgagaggtttcctagttgatgagggattaatcccatgaacccacttaagctaaggtccaagtatctcagactctccaatgagcctaggaagcttggtattggagtaagaacaaaataatttgaactcaagtccaaacgattcaaatattttagttcaagcaaagaaggactaatctctccactcaactccctatagggagagcccgcaggtgtgtcaagattgatttccatgactttacctgtgttgttgcagtgaacccctggccatgtacagcaatccgatttgtcagaccacgatgaaagcctgtttgaagggtctgctagtccatgcttgaagctgaggagtgcattcctttccttctcgctgcaagtcatattgagccttgctgccttgcttgcactgaagtggagagttgttgcagtggacaatatcaagagaagaacatgagttgcatatagcactgccatgaagaagaaggaaaacgaaaaaggttgaatccacaattttctggttcacggttggtatttactactaacaatgcctatataggatatataccatagaagggtttgcatttaaaattttattccactaatggtggtggttgcaaaatgcacacatatgtagaggtatatatgtctacaaggagacattcaggattaaaagtgtctaaccacatgttaggaaccaagcttgagaacgtgaaccacctatgtttcgagggctaggaaccctncataggagaaagaggaggagagagactaaggggagaccttgctgttatatttttctgatatcaaaagcgcttaattcatctacatatatagctggtatgcagggaaca

SEQ ID NO: 4097 - DNA, 1196 bp, Glycine max
aaagtgtgtttaagtttatcataccatgctctaggtgcttgcttaagcccatagattgccttattcagtctacaaaccagctgtttgttagaattttcaaaactagagggttgttgcatgtacacttcctcttccagcacaacattgaggaaggcattgttgacatccagctgttgaaggggccatttattggagatagcaagagtaagaataatccttacagtgacaggttttatcacgggagaaaagttttcattataatcatgaccaagcctctgatgaaaacccttggcaaccaggcatgccttgtatttgttgacagaaccgtctggattttgttttaaccgaaagacccacttacatccaatagctatcttgtcagaaggaagctcaaccaaagtccaagttccatttctattaaagcatcatattcagactgcatggctgcaaaccatgtgggatttgagatgtcagttttaacagatttgggttcagcatgagtcaacagcagtgtagggttaagtctgggttttactattccagacttggcccttgtacacatgggatgagtattttctggtctagataaggagggttgaggtggggaagcaggctgtaaaggttcaggaattggggagggagggtcaggtggtaagttttgagaagtggggataacaggatcagagggagtgtaggtgtaggggaatgcagctgtgaaacagaagcagttgtggtaggagaagaaaggctaggttcaggtgtgggatgataagaagattgctgctgttgtatagaagcagtggatagggataaggttgagaaacaacagaagaagcagggatagttggtaaaactgtgagaggagttggatttgattggtcagcaataatagggttaggctttgaagaaaatagggtaggatagggaaattttgactcattacacagtacatcctttgagatgtaaattctgccatcagatgctagacatttgtaacctttgtgtgagtaagagtagcccaagaaaacacattcttgtgatgtgtattgatgtttatggatgttgcagggtcttagaagagggaaacaaacacacccaaatattctgagaaaagaataatctggtgttttgtgaaacaattgctgaaaaggaacctcattttggatggatgtagatggaagtctgttatctagata

SEQ ID NO: 4098 - DNA, 1144 bp, Glycine max
gtttaaaatacatcccaccgtataccacattacattgtgtttttgttttctaagaaacacattacattatgtaccctgtaaagaggattaatgtttagttaaaatagaagatttatcatgcgaatttgacaaaaagcacggggagtatcacggtaatttgctgtacttattattgattattgataagatgatggtatatagttctatttactcagtatcctgcatgaatatactcattagcttctcaatgtacaagactagatcaaccacttgaagcagtgatgcacaagtattttagggttaactattttaattcaaagctacacacaacatgagcaaggcaaacataggttgcagtccaatcaaagcaatagagacaaaaaaaaaaaaaaaaaaaaaaaccaaagaaaagatacaccggcaaaagaataaacagaacatgttattaactgtcatagtttctatttgaatgtacaacacaacaaatattgccatttgctataacttagcttgatcaactagagtatagtataatcaaccaacacctagtcataattttatacacgctaccccacctaaaactgatccaactaaagaataaaatatatataaaaaaattgtgattttatctgtctctagtgcccccgaatccgttctctttttacaagtcatatgtattttcttacggaacacaaatatgctggaattagaaaagattattataaaaattctccgactgaacaccacattaggattgagtgaagcgatattgcaattggagttttttctcttttataagtcacatgtattttgtaccagaaacaaacatgtccaaactaggtaagactattattatagaccacaaaattttccgttgattgcgataatagttacccactacagcttgaacccgattctggatcaacgggatacaaatcttgaacaacttcaccactgcttccaccatcaagcaaaagcttaaaaaacgccacggctttgctcttccctttggggctaccgtgttcctgcacgtacgcgatcccatccaagcccccaactttgtctctaacctcccgaaaaaccctctcactcccacacctcaccaaattcaacaacgccgcaacagcattctccttcgtcctca

SEQ ID NO: 4099 - DNA, 1118 bp, Glycine max
tagtccttttttaggctcattgcaatgtatgctacaatttggtacatttggttggagacactctcctatgaggtttctttgccacataacttgatttgggattagatcaggcttcacaacattttacacaatacttggcatacagtgatttacaagtttattcacaaagtgtgtaattacaagatactaaaaatatttaaacaaaatccaggaggaaaagattatggcatatatacagaagaagccatatctgtcatacaactcttgatcattactaaacagctagacaagtccatccataatcaatttgtatttaacaggtttccatctgtaattatgtgatctcatgatttgtatcacatgcaaacacttgatcttagaatgtgggtttgtacctaattcaaccccaaaagttagctcataggatgagggttgctctccacttatatattgtatcttggcactatctctaaccaatgtgggacttgggtttttcccaacaccccccctcactcccaacacttttgggcttggtgcatggatagcatggtagatggccctttggatgaatctaggatagactttgataccatcttaaaatgtggatgtggatttgggcctaactcaagtccgaaagctagctcataagatgagaattgtcctccacttacatattctatcttgacactatctctagccaatataggacttgggcttttcccaatacttgagatcattaaagcaaaaactgtgaggaaactgatacatacaaatatgttataaagataatttcagaaaattccatcaagaagaaatgcttgtagaagttggagaagatgaatgtcggttaaaagcatcatatattgtgctgaacaattgcagtagaaaaacaacacacacacacacacacacacacacaccagaaaagtattgaataaaacattctacactctttcataccttagctacctcaagaaatcccttacaggtatcttcaaaattaacctgtagtgaaacaaaaacacaaatacataaagtcaagaaaatgattggctaattaatcataatttccaataccaggccccaaagtcagcacatagatcaatgctggaaggagt

SEQ ID NO: 4100 - DNA, 1007 bp, Glycine max
agcaggtttcttctctcactggccagcttcaaagccttgcggaggaccttgctgaggtattatactatatataacttgcatccatgtatggcaacaatttattgtcaaatcggggaaatgctggtcattgaaattggttactgattgagatgaacatattttaactacatatgattatgtctttcattgaagctttcaataactgtatcttctttaggatacgtttgagttctttttcaaaatttgttttcagttttcaaaatgctactaaaaaggttgttcagatggtggaggaaggcgcaagacactcaacggagtgtggaattgattaagtcaaataagatgaaataagatgagaaaacatcttctagaatctagatgtttctatttttggttgttgaatagtgttgaattgttttaaatactttttttaaaacaaaattgagaagagaatcaaacaagtcgtgatttttttttgctttttcatttgcttgttaggtcaaggctgataagtattcagcaaaagcaggtcttccaggttatggaagttctccaagaacaccaacacatgcccgggaagatgcttctaacttttgggtaagcttgcaattataattcaaaattataattatatatgatggcttactggtcacagaaataaaaaaagtcctgctattaagccatagaaaatgtccttaagaaattatatttttaccttctaacctgataagcataaaaattctgctattaagccatggaaaatgtccttgagcaattctattattaccttctgacctgacaagcaatttggttaatctgctcaacaatttatgcaggaattcagctctgatgaccaatctgacgacctattactgaatgatctaaatccatgcttaaccccctgcgctgttaaatcaagatcaagggtaactaaacttctctagtaaatttgttgtgaattttcccttatgtttctgaaattggtttcttatcaaatgactccattt

SEQ ID NO: 4101 - DNA, 1143 bp, Glycine max
gatcgacctgcagcagcaggtttcttctctcactggtcagcttcaaagccttgcggaggatcttgctgaggtatatataacttgcacccttctatataacaacaatttattgtcaaatcaggcaaattctagtcattgaaattggttactgattgatgaacctgtttcaactacatgtgattatgtttttcattgaagctttcaataactatttcttctttaggatacgtttgagttctattttcaaaatgtgtttttggttttcaaaatgctactaaaaaggttgttcagatggtgcaagacacttaatgaagtgtggacttgatgaagttaaataagatgaaatcaggagtagttgtttctattttttagtttttaaaatacttgttttggaaacaatttcaaaacttaaatagattttggacggtatattggttgttgattagtgaggaattgttttagaaaacagttttttaaaacaaaaatggagatgtttgattctcttcggacttgcaagtcctaatattcgtttggatactattcaaattcgattattggcagaaacaattcttggtcagactttacttacttcccgatcgaatttctaatttgtcaagagtctctttttttgattaactggagggttaagacaagaaaaaacaagtcctaatgattttcttattcatttgtttgttaggtcaaggctgataagtattcagcaaaagcaggtcttccaggatatggaagttctccaagaacaccaacacatgcccgggaagatgcttctaacttttgggtaagctttataatataaatgcaaattcaaaattataattatatatgatggattatatgtcacataagctaatcatgagtcctgctattaagccatagaaaaatgtccttaagcaattctattattaccttctgatctgacaagcattttggttaatctgctcaacaattcatgcaggaattcagctctgatgacctgtctgatgacctattactgaatgatctaaatccatgcttaaccccctgtgctgttaagtcaagatcaagggtaatttaactcctgttgtactttgtagtaaattttcccttatgtttctgaaattggtttcttatcaaatgactcccttt

SEQ ID NO: 4102 - DNA, 1178 bp, Glycine max
agtatacacaatcaagagcaacttatttgcaaataggtatcaataaaacagaaaatctgaagtgtcaataaataccacagataaggctagccattgaagacgctgttaactccacgaaaattccttccttgcatatcttatctgcaaggaataccatgttcctcaaggcccatacagcatttaaccttaaagacgaatccattgacttcgtcaattgcacaagctctttaatgcccccacactctatgaatgttgatttatgtggcataaagtcaaccactatattgctgatggcaccaagggctgcaacctggaaaataaaacagaaaaaggtctgccttctaaacttcaagaaaatttatgaggccacatctgtttaattacaattaatcaatataatattttcccaacaaaaaagtcttagggagaagtggtcattgtgattatgacttgagtctaattaatgccaagcttcaaattatgattaataatatgataacatatactattgcccttgtgataacctcatatcattcaatcgcaacatacgatatgggtgaaataacaggtaagcttataatagtgatcaacaataggataacatattatccctttgagataacctcatttaatgtgagatagaacaatttcagtgctaaatcatttgaatttgtccatcaatatgcagtgcttcttgtaacaacctttttttatgtatgggacaacataaatgttacaaatttagatcaatacagaatagcatcagaattatcatcacaatagtatacacatagtcacataaatttatgcaaggaacagataattcaatatctttttttttctctgtacccctcaatttctaaagtttggaagcccatcctttagtgtgatagcatgttccatttccaaacctagaaactactcaatttaacataatcagaaaagtaaaaattatagatacaattgaaatacctggacagaagtagaaagatcagagagaagctgaaccagaggacaaacaaccctttcattcataaaacgacctgcactcaaattctgaacagagttttatgagaattaaattgtacatagcaatagtataaaacacttcaagtgccagatgtcatctcatgttacagaccttgattgagcgagagacacttcttaagcaaatgcaa

SEQ ID NO: 4103 - DNA, 1265 bp, Glycine max
gggagcattttggactcataatggttggaactcaactctagagagcatatgtgaaggggttccaatgatttgtatgccatgttttgcagaccaaaaggtcaatgccaaatatgcaagcagtgtttggagggttggggtgcaattacagaataagctagatagaggagaggtagagaagaccattaaaacactcatggttggggatgaagggaacgagattagagagaatgccttaaatttgaaggaaaaggtaaatgtttccttgaaacaaggtggttcgtcttactgtttccttgatagattggttagtgacatattgtcactgaaatctgctacatctagagttcactgatatctttactaacaatcaaccggccacatgtattgcaaaaagcaattcaatttatgaatcaacaaaatagactgaaggaaaaagctgtcatcaaattgtaattcaatcaaatgctgatatagcacataatatcagctaccaattcctcttaccttgtctacagtttacttgtacttttattagtctacaattttttgcttatactcctctaggtttatctgtagtgggataaggcttttattgtttgttgtttattccactaggtttatttcctaacattaaagattaggtttatactgtataactcatacatattgcctttgattttttatttttaggtggataatggatatatagctagtcgatttctatctattagagtctcttccctctttcttctatgtcatgccttccaatcttatgcttgcattcatatcaaacttggctagacgtgagccattttgatgcaaaactccacctaggtaggatatagaataagactactatgcatgcaattgactagctagtaaaaaatagtgtgtgcttcattgtcatattaaagcaaataatatttcagttgaggcacaacgtaaatgcccacctatatatatcaatctcatgttaaacttcttaaattatcctaccatttgtttgttgaaggaaagctcaagttgttctgcacctgttgtttccctatatcagaaagtcttatgttatctaccatctgtcgtttgttcaggcaaagcaccatttgaaagtaaaaaaacttattatgctttcttgattttcctcaaccaaaacaataattatgaaaaaaataaaataaaaggctaatatgtacagtcactgtcagagtccaataacattgttttcttgtccagtttcacagctttagttcttgtttagacctttt

SEQ ID NO: 4104 - DNA, 1160 bp, Glycine max
atgtcatttaagtgtttaactatttaaaggatgagtgtaacttccacttgctgatatcatattcagaaaagctattgatagcaaaactgaaatttctcagttttgctatcaatagcttttactggatgagtgtatctcagttttgtaattccaaactcaaaatcaaaaggaataaatatttactggatgattttaagatgttttatcaatagtaaagcaaaaaagaaaataaaggaatgacttgggagtaatctccacttcagtacttgaaattgtgtttgtcactttagtccctcccataatgaaactttcattttggtccttttccattacatattttcacaggtaaaccaccattttagttcttgaaagtgtaaagtgaggtcacattagttcctaaaagtaagaaatttcaaaataagtctttatgctgacactttagttcctaaacttgattacttattagttattatcactttagtcccttaaagtatgttaatattatcacttagttacacaatttttcaaattttggaatagtgagtgattgtgcctcatagtttcaaggacccaattggctaatctgattttaaggacccaagtgtatggtatttcacaacattttacaatgttagaaactaaagggaaagttttgtaaaattagtaattaaattgaacaatgctttcaattcaaaggatgaaagtgtaggtttattgaatgacatagattatatacttgtttgctttctatctctagtctgtgatccaaatccaagttttcatttattgttaaacttctgtgctgatttgatgcatggcaatgtgagacaggaaaactcaaggctctggatggtgaatggatccaagttatatttgaagcacctgaattgaaggtaggatcatggcaggtccagtatggtggccagagtgaagttaaactcagaatcacttatgttgatgagaaaatcaggttaggattgggttccagaggttccctgtttgtttttcaaagaatatgaaaccaaaatgcgataagaaaaaatcccttcaggccttcagtgaaagttctggcaagtttgtaacttgacattgcaccgtttcatgtatgataatatgattaatagtgtatttgagtaggagcttgaaaagaccgctttact

SEQ ID NO: 4105 - DNA, 1021 bp, Glycine max
ttgcatgcctgcagtagcagaggcaggatattaatagaggaagataatgtaagtgtctaagtgaaggcaggcagttagtcgaccaattagtttccctatgcaatagtagtagtccatatccttgtgtgaataggatattcatgggaggtcaatctaaacacttgtaatgctttcttttgatagaatgatcagcttacgaatgctggcagcaaactgctttattcgcagctgtgcaatgcaatcaaactctatgccattcctaggtttgttgtcactactatggttttttcacttcacaccacccagacctgacttatttggcactagacagaatatcattcaaaaccgcagttgccacacctcaatcttctctatcaaaaccaaaaaccttttgcagaaggtacttttacacttcatgcccaaaaccaattgacccctccttaaaccacattatattactttaagacacctcttgcaattaccaactcactgtaaccctccaatcctacattttctaccataaatccaagcctaaccttccactgtctgacaagagaacatagacaacagtagttgctaaaaacatttaaattttaacttattaaaacaattcccattttgcagacactcaactgactaagacttcctgttcacaaactctattattgaaaaaacaagaagaagaaaacttacctgtacaagctgagttacttcagtttttacaaatgcattggtcgggaaccttgaggccaaggataaagcaagcctaggatccacagagaaggcagtcctagtatattctatccatttatctgcactaatcttgggtcgggaactactttccctgaaaatacataccagatatttgaaagcttaggacaagaaaaacaaaacatataacgaaattccagtggtcagaaacagatatttatactttgtgttagtcggctgtgcccagacatcaagcctatcagcctcatgctggcaaagcattaaaagtagctgcctccgtttttctctt

SEQ ID NO: 4106 - DNA, 1269 bp, Glycine max
gtagctgttggatatttgtagcagcggtggagcaaagcattaaccactgccaaaagtctctcttcgggaagagtgacaaaccttgaaccaatttctgttaacagggtctgcaaaataaaatgttgtcataatcatccaagtatcttgtagtttaggcaacacatgaaccagatgttattttcagatacattggcacaattcacaacataacaggtatgatgagcaaatcattttaattcggtgctagactgctagttcaatccacagaaacattatgcaaacaacatgaaagatgagcttccaggaaataccaaaagtagaaaattttgctacatatccaagtttatatcaaatatctacagttcttcatgtgcctttgttcagtgtttcccttcatgtcaaatttgctacattgataattgattcatagctccaatcaataaatgtatacagttatcccattgtttgtcctaattcctaagtgctagcagcaataatttagtttgattttgagaccaagtgcagaactctttcacacatgcaatcgggagaaaggttgggagatggtgaggttgcatagcattactgttaaacaaagcaaattaaacttaaacccctgaaagaaaatcacctcgagttcactggccaaattagcatgctttcccctaagagcctccattatatcttttgcagcctcaaaagcactggcagctgaagccacaaatcctaaagcaccaggacgtcttaaagtattttgaccaccttcatttccagaaacttgctgcaaaggttggtcatttccattgtgtatgctgctttctgcaattgtagacctttcgggttcttgcccatgtgagtttccaccatcatgagatccaattccacctggctgggagccttggtgaacttgaatatcagatggcaagttactgccacctggaccttgtactcttgaatttccatcagacaacccaccaagagaaccaacactagtagtaccagaaacactttgttgagttctttgttgagccattgctattctaccaagttcagatttattggcaacatcacgtcgttccagcaagtatgtgcgcaaccaataatacagagcctgaaattcaggagaagaaagtaagataatttaggatctaaaaaacatttccaatgaacaaatgcaattatgcaaacatcacctgaggatacaatgttgcaatcttcaaaagaacaagtttacagtgaggagcttctggtcctctgcaggcagtgcaa

SEQ ID NO: 4107 - DNA, 1243 bp, Glycine max
ttaaagagctaaataacaacgattatgaggttatattggtgacttcaggagcagttggtcttggccggcaaagactaagatatcgaagattggtcaatagcaggtttttgtaatttctctttagatgtagcaaatacataattttcaaagacgtgcatcgagcttttcgctttcttttaatagcttctacatacttcagttacatcaatttgtaaaacttggtaactgtttagtatttggtgatgctcctaaaaaataatgagtttttcatgcaatatattttttttttggtgaatatttttcatgcaacataaaactaaagaaagaaaaaaaaaatcagacttaatcattgatttatgttatcatatcaaacagaatagaaaagttgtggtacataaaatcattgtgtttgaagaagtaattcaactttttcatttttcattgcccactcggagcatgcttccttttgtcgttttgttctttttgaaatgttaaatcagcatcaatatgtgtttgtgcaaaccgttaagcggtatagcattgagatggaacttgtgcgaaccttttcatgtttctatcaatataagattggtagagtttaagagacagaggaagaaaagatgagcctgaaatgaaggtttattttttatttttttatgcagcttttcggatcttcaaaatccacaaggagatcttgatgggaaagcatgtgcagctgttgggcagagtagtctcatggctctctatgatctcatgtttagtcaggtgcacactaaattaagttgcacattcaattcaatatgtccctaatcttaaatttctatgttttgccacacaatacattaacacgtgttttattaatcaaatttgtatgtttcctctatattgatggtaatatgtcatttgcctggtgcagcttgatgttacttcatcccaacttcttgtgaatgatgggttttttagggatacagctttcagaaaacaactttcagacaccgtgagctcgttactagatttaagggttattcccattttcaatgaaaatgatgctgttagtactaggaaggcaccctatgaggtaagctgcttttccttacacaaattttcctttgtgaaaatttagtctcttttatttctcctagaaaatgttagtttgattttcttcgtcttgtgacgttaaattattacctttaagggcaagaactgtctgcaggtcgactctagagaaggacccgggttacga

SEQ ID NO: 4108 - DNA, 1030 bp, Glycine max
acaattaagttaattgaattattccctaaccaacaaaaattcctcaaacccattttattagccttagcagagtaaatttccttctatagtggttcaatcccatcacaaaacctctgagaggatgcgtttctgcattcaatttcgtttatccattcgaaaaaaatggaaacatcttggacactgtcatgctcaaatattggctaaacactaaggtctatatattaaactaattaaaccaagatattaatattacttacttttttttgagctaattaatattacttacatgtgaacataagttgtgtaagaaacagaaacttgagaaactcatttagaatggtctcaaatctcaattggttgttacttaacttgttctactaattgttatcagttaaatcaaaccatatttgcttgaacactttgataatgagatcatgatactcatctgaattcaaagaaaggtagcaagctagaagatcctccaaatcctttgatgtccttatgttgttctgcacaatcatctccaccattgattctctgaaatccctctgtggattcagtgatgacttcacaactgcaaagctatcggagaggcttctccgggcggcggcggcggcggcggcggccgaggacacgcttctccggccgtttgcctgaactctccggctggcgattcgcggagaattcatccgaagcctcactccaggagaactcacagagaatctccttccatagttgttcttctgtcccttcattgatgcagtgtcttccttcacaattttaaccctcagagggcccttattgaggtttggttcttcttcatgtgcagccatcttgcttctggttttggtttctttcttcttggcatcactgagcaagtcattgaattttgcaggctttgtcacaattggtggaagcacaaggcctgagaaggaatcacattcataatcatatccttctagcttatcatcttttctggctatggaattgttgtcaatatcaatgatgatgtccttggtgttggaagtgt

SEQ ID NO: 4109 - DNA, 914 bp, Glycine max
aagatttctctttattataagttgagtccacatatgatgtctatttctattcattcctgactctttgccatttggggaaaaaataagagattctcccttatagaagatcaacagctctatcattgtaagaattagtggtttcctttctagaagatcaagattcaagaatgtatatgttagcatccaaatctgtcttctaaaatttaagtttattagttcatttgatctcttcagtaattagttgagctcaatggtgattgatccttatatccagctccacatagtagcataagacttcatttcaatcacttgcactgaattgattatagccacacgaggttgtgattcaaatatgatgcaaaattcttgttcctctgtattatagatgttcccaacatcccttgaaacgaggacttaaaagtacacatggcttaaaacccatatcagtttcaagctcaaaatgcatgtcatcctaatttgttgagtatgtagttaaaactcacagggagatagattgaaaaatttgctttattgaaggaaacagtgttgcaactttatgtcagtggatctaactcatgcattatgtataatgctgtgtgttcttacatttcgctgattgtaaactcaacgaccatatgctgcaattaatcactatctatgtattgtttttcttacacattatatcttgtgttttttgcaaggtacgttgcagtggggaatgaaccattcttgtcaacatacaacggttccttcgaagccacaactcttccagctctccaaaacatccaggcagctctcacaagatctggtttgagcaaccgtgtcaaagtcaccgtccccttaaatgccgacgtataccaaagctcatccgaaaagccatccgacggcggtttcagacccgacatcaacaatgt

SEQ ID NO: 4110 - DNA, 1249 bp, Glycine max
agtaaggagaggatcctgatacatccaaagaatttcctcataaaatagcagaagatgatccctaacagacttcccataccttttcagtattccccctaacatattcctaaaatttaggataacacagtaacaaatggagtgttttagcctatacctaggagtaatggattgcaagattctgaacaggcagcttgtaaattgttgttatattgtttgatatcaaacacttgtgattcctggtgttattattagttacagaatttgtaggatattttgtaacctttcctgaaaaaccatgctattccaaatgggttgacctatttagcactggctttgaagtaaaatgttgtcatttcatcatattcaaggtcccttatttcaattcaaggacggcccttcatgcaaaaatattttagtatatattcaactgtagttttaattcttatattaatgtccgttgtaatttcttgttttacccactaaggctgagattttccagtaagttgtagtagtatttaagttcattaggaatctgttatcatcatcatgagcaaaatctgtttcactttatgctgccgtatctcatggtgaagagaccagattttatttattcaatgttaactgtgaccaaacactgttcccgttctcctgagggattacatggttctgaatattcgttcatggtttaggattgtcagaagacaggcaatggccgtaaagagggctttggtagatttgtggcagcttgcgttttcctaccaagtaaatcctctggcagctgttcaaccactgtctgctacaacacgtcaaggtcagtgatgccatggtggaattgtttaccaaggaacttgtcatagctgatcgtcagtgtacctttgtgttgactagccttgtagtttcagatagtcaatattgtttatgcgcttcgttattctgatcaataacaccttgtgagttgtgatggagcattaccttcacctccacaaatgtgaagtaatttctcatgctagttattccatgaagtgagaggataattttatatcagaaaaaaaggtgaattattgtgtataattgtattaaatgtcaggaattgttagcataatttgtacaaaaaatttatatacgtgaaagatgcacaacacatcgatccatgtatgctttttctatactaggaggaatgcttgagattaagatatagtcatagaaaacagagatgacatatccactgcaggcatgcaagctggcgaaa

SEQ ID NO: 4111 - DNA, 1193 bp, Glycine max
aatttgaagaagctgaaaaggatgacaagtggataaatgctatgaaggaagagttgaagatgatcgaaaaaaatgacacatgggagctagtggacagacctcaacacaaacaacctataggggtaaaatgggtttatagaaccaaacttaatccagatggttctgtaaataaatacaaggccaggttggtggtgaaaggctatgctcaggtgtttggagtggatttttcagaaacctttgctccagttgcacgtcttgatacaattagaatgctacttgccttgactgcacataaaaggtggaaagtttatcatttagatgtaaaatctgtctttctaaatggttacttgcaggaggagatttatgtagagcaacctgaggggtttcaaatcaaaggagaggagcagaaagtttacaagttgaaaaaagcattatatggtcttaaacaggctcctagggcctggtacagcaggatagatgatcatcttcaagatcttggatttgtcaaaagtccaagtgaggctgcattatatgtgaaattggtagatgcaaatttaatcattattgctgtctatgttgatgatttacttgtgacaggaagtgatgagaaactcataaaggagtttaaagctgaaatgtttaaagcatttgaaatgacagatcttggcttgatgagtttctttttgggaatggaggtgaaacaagatcatgatggaatcctcattcaccaaaagaagtatgcaagggaaatactcaagaagtttcatatggaggactgcaaaagcactacatctccaatgaaccaaaaggagaaatttaacaaggatgatggagctgataaagttgacgaaatgcattacagaagcttgattggttgcttaatatatcttactgcaaccagacctgacattttgtttgcagtaagtatactttcaaggttcatgcattgtgctagtgaagttcatcttcaagctgccaaacgagttattagatatgttaaaggcactttagactatggtataatgtactctcattctcataattttaagctccatggatattatgatagtgactgggcaggttgtattgatgacatgagaagcacctctggttattgtttttcatttggttctggagtcttttctgggttctaaaagcaagaagtgagccaatcacgaaggcagcaatctgcc

SEQ ID NO: 4112 - DNA, 1166 bp, Glycine max
ttgcatgcctgcaggtagcacggacctttagcacttcagccagcttcaatacattctcatactcatcttgttgcttcagagcagcaaactgaagagagcttatttccattacattctgaaaacacaatgaatgtctgcaaagttaaattaaaagccttctgcaatcatcttaagcacatttacactgacacaaaaatatagacaagcggtaaatttaatcaaataaaacaaagaccatttagtttaatctttcagtaattgctatagcatcccacttcctgaagaatcgcataattgcagattggccctaacgtaactgatagataaaactacatggcctttgttttatatagtttatgtatgaatgaagttacgaccatgatgatggtttagattataattataaagacattcatgtcatagagctttctgtgcttgaaaagcatcataattctcacaaagtgtttttcttaatacttaacgtcactgagctatctcattaaatattctagtgtttccaactaacaaaagaagatgtttcaaattacaattcaaatgagtgtaagtatgaggggtgatgaacccagttctaatgtaccaaaataaattatgagtgtttaccatagagcatgattgtcctgatcttatgaaactgttcatgtatatatacacaatgtagttggctggttgtgtataacaagaaggactgcatgaacttttattaagtttatgtacatgtaattagtgtcaaaattaattcaaagggtgacccaccatgttattcacacatcaagcccaagaaatgttgggtatgagaagatgtattggaaaaaacccaagtcatacacatcgactaaagataacgtcaagttagagtatatagtgagggacaaccctcttcgagttaacttttggggttgaattatgcctaaactcacattctaaaaatctaagagatacttaaaaaaaactagtatgtcatccttaacaatgccaaaataatttttatttcaaaataaactacactttcaacataaattttgggcaatagcatgtaccaatttatttctcaaatgagaattaggaaagttaagcatgtaatatacactcttgatgcatgatacaatagctactgaccttttgaatcacctcagtaaagttcttct

SEQ ID NO: 4113 - DNA, 1028 bp, Glycine max
aggtcttaacatgtggatttcctcctttggaggatagagataagtcagttacactacttgcagggcatgacttttttggcgcgggtactttcactaaagaggaaactgtatctttatgatgttcttccttgtattaagctgatgcaagtttattattattacgaaacctgaagtttgtttggtatcatactcccacaaaatgtatctttcctataccttttttaaatagattagactggcagagatggaagaaaaagcagtaaatgacatgtttattatactttctgatatttggctagacaatgaagaggtaatttgaaatttttatttggttctctttttttcttcctttccttaagcaccttgttattagtatgtggcttgatgtaatcttgatgctgtttttcctagagaagactttgaaaaagctagaggttgttctggatggctttgagaaggagatagtggttccttccttatttgttttcatgggaaacttctcttctaagccatgtaacctttcatttcatttttattcgagcctcaggtgaattccacttacgatgtttgtattttgttcattaacagtgataactaaaagtttggagttaggaaagtatagctgggattagattatattatttgatgtgccgtatcattataattagttttaataaacaatgttgtcattatttaacattgcttaaaaaaggatatttattatgtaaggataaaaatcattagaaaccttaatatgcagaatgcagtttggtaagctgggggaaatgattgctgcccatacacgactaaaagagcacagtaaatttctgtttattccaggtcctgatgatgcaggtattgacattgttgataattattcacgctctctatttttcttcttcctgtgtcatacatcactttcagcaatttcatccaggtccttcaaatgttcttcctagatgtgctttaccaaaatatttaactgaagagctccaaaagcacattcccaatgccatattttcaagcaa

SEQ ID NO: 4114 - DNA, 1018 bp, Glycine max
tgatgttattgaaacagctacacataatgaaagttggggcgagtcacgaacaaaggagagccccttgtgtactttttgtgacatgattgtcttttggatgcaagttcagcttaagcaaaagaatacaaaggaaaaaatattaaaatatgtggatgaggtaattgttgtacaatgagttacatctcagaattatccttttcacttttgaattgagtgttcaataactctatttttccaattaaggactaacaagctctttgttttttttctgtaaaagctgtgtgagaagcttcccaatcccgtgggacaaacatttatagactgcaatgatattgcaaacatgccacaaattacattcaccattggaaacaaatcatttcctctctctccagaacaggtctgagttttatggtcaatttttctagtcctcacataacttttcagttgccttgagcatgcattatgcataatgtatttacatcagctacctagttcaagttgttttggctctcgaattttccttaaaaatgtttgacaactaaatatagcaaagtttctgttggttgtttgaattcatatttgttcactatcacttaacagttcaagaatttaatattccttttttttcttctcagtatatgctaagaattgaagaaggttgcaacactgtctgctatggtggttttgttcctctagatgtgccagctccacaaggtcccctctggtaatgaataatattcgtatgactactgctgcatattattattgttatagtaattagtaatagtatatgacagttgtagcatggttgcagggttcttggagatcttttcttgggggcttatcacacagtgtttgattatggcaatctccgtattggatttgctgaagctgcgtagtcaaaatttggtggtgttattacaatgccaaattgtttgtaggaaaaaaaaaagagaaagaaataaaggtttataggattttgcagcatttaaaaaccgcagaccctcggaatttcagt

SEQ ID NO: 4115 - DNA, 1013 bp, Glycine max
tattaataaaatgtttagtcatacttatattatgctctaacctgatacaccggatagtagcatacattgtatgttgctataaaaaaaatcctctttaattctgccaaaatcactaaagctagacaacaaaaaattttggcacactcatcattgggttcatgagtcattccacttatatgactgaccttctcttagaccatttttttatgtgtaactttttctggcatgcttgaattaccaacatatgtttgcaactgataaaataactacaaagttaatgccattttttgtctagctcttgatgtctttatattgttgctttaattattaatatttcattatctccatttactaatttgggtgcttctttgcctgtgattataccgtcatttgatggatgcttcaatgttttcagcaagagattgacttgttgaaggtacttctattcctcaatgttggatttgcatttttttgtattacattatcaattgaatttttttaaaatcaatagctgtcatggtattatcttctccgtttctttcaagtatatattgtgcatgtaagctttaggcaatgatattaactacatttttttttatccgcaaaaataatattatatattagataaaagtcagtacaagtcgtactgtgatttttactatcaccaatgaagtctcccatgtggaggtttggttccctaatacaaaaactaatcttgatggattaaagaaccaaaactctaagtatatattagtgattcctatctgtagaactattttccactagttaccaaacccttctctaatatggcttgaccattgatgaaaaggagtgtcgaatcctttttccaggttcctcaaccagctccagcaaaagaaaatggcatcatccagtatcttactggtgttgaggccttcgtttgaaaagatgattctgtttctatggttccatacactccaagttagtgccacccaccaaattccccaactctgtgacttgataccaagatgggt

SEQ ID NO: 4116 - DNA, 1164 bp, Glycine max
cgtgggtctaagcacccccgacttatcctctaggatcgacctgcagtacttaggacaatagttttgtgaaaaaccatatgatgtttgtaacatcatttctggaaattaggcttcctgaagaattagaggcagtaggataacaaatttttcattactttcattcattattatgcccaagtgaattttaagtttctaatcctatgcaaattcttgtccaaacaaatggctactgcaatttgcaattgatcaatgatttcctaacaagtgaataaaggacaatgaggttggatctgtttaactggtgtagataaaagcattcctgcaccattcaataatttgtattggatagttattttacataattacagttggatcagaagttcttatcatagatcatatttgtgaacatttacgttaatctatgtagtatttcattgatattaatcaatgttaatgttatagattaatctatttagtatttcattgatttatttttctaaaaacttagacacaaatggtataggtaattgataatcataattcaatatttggatcaacaaaaatcacgttctatatgaaattatgagtggtgtaagaatatttttttacttatattggtagaattccccccttatcagattagatggtgatgtaaaaatttacaagtcgttgcaaatatttaggttatctgtgatgtgcctagggtttatgaagtcaaatttgataacattggagttaagagaggaaggacataaactgtggtagattctaaaggatagattcaacggacattaggctttcctgtgggcttcttattctggttgcaatatgatatgttacattgctaccattgaaaacagaaagaaagaatctttatcgtataggaaaaatctataggtctggctcagtgtgagtgcggcctggaaagggaaatacaatatgacaatgctccagagaaattagaccctggactctctcctaaagaccttacactgttcaacaaccagatcccttgatttgttactctcccatacataacaaccatccctaaccagcattgatccagacttctaaccaacactaactactaaactgattcatgttacatcaatttgggcattgctagcttctggcccaatttcctttgtaatatggatctgtttt

SEQ ID NO: 4117 - DNA, 1900 bp, Glycine max
tgatacgccagcttgctgcctgcgcggctatgcagctgcaaataatagccccttcaccgtcttttataatcctaggtccactatttaatattaatacctaatctctttgattttcactttgcttccttctctgtccaataagattgcaaaggcacggattagctattttgtcaaatgtgtctaagttctcaatttatgtctttcttttgtttgcaggactagtccctcagaatttgttattcctttagccaagtactacaagtcagtgtatagccaccagccatcacttggcatgcgtttccgaatgatgtttgaaactgaagactcaggaacaagaaggtgcctcacttttatgtccatctatatgaagtatgcgttgtaaaagtatggatgattgagttcaaattaatgccttcatgaagtaaacttgggtggttgaatgaatgtcatagttggaagatgtagttagtttgtcttttaatttagttggtgcttgaataagtatttatttctccatccagtttcattaaaattggcattattttatgtagcactcctggaataggggatgcttggctgaaaatggatattatactggctgacaatgaaaattatatttaatcatttcaatcgtattgcaggtatatgggtacaattacaggtatcagtgatctggatcctgtgcaatggaaaaactctcaatggcgtaatttgcaggtaccattactcacatcctttagcatttcatgtatgtaattccccaccccctgtctatcagtaattgaatccaggagatttatattttcagaatatgtctgtttatttaatatggacaagcaatggttgttaagttttacatatcattggtcaggttggttgggatgagtcaaccgctggggaaaagcgtagcagggtctcaatctgggaaattgaaccagtgactgctccatttttcatctgtccacctccattctttagatccaagagaccaagacaacctggaatgcctggtaaacaattctactatatacattttagatgcaaagaggaaatatatttgttttttcaaaaccacctcttctagattcttcattcttgagcttctcacttgtttcctggtggtgctttcactttattaaatttcttaatggaggaaaatttaaatttagtttagtgattggaaatatgtagtttattttggctcattttttctttactttggcagatgatgaattgtctgattttgataacattttcaagcagacaatgccttggcctggtgatgatatgtgcgtgaaggatccccaaggtctccctggcttgaacttagctcaatggatgaacatgcagcaaaatcctgcactggctagctcattgcagccaaattatgcaccttccttatcgggttctattttgcaaaatattcctggacctgatatttctcaccagctgggattttctgctccacaaatttctcagtcaaacaatgtagccttaaatactcagaggcttcttcagaccgctccacaactggatcaccttcagaagctaccatctacttctagcacattgggaacagtcctgccgccgcagcaacagttgggtgatatcactcaacaaccgaggcagaacttggcaaatcaaacaatccctcagggtcaagttcaggcccaactcgtgcatccccagaacattgtccaaaccaacaatattcttcaacagcagcaaccatccagtcaaaaccatcaactacatagaagcctctctcagaacccatcacagcagcagcagcagacaattatggtcagaatcaacaccaaaatttgatacagtctcctatgcctgatcatgttcaacaattacagatgtctgacgatcagattcagctgcaggcatgcaa

SEQ ID NO: 4118 - DNA, 1242 bp, Glycine max
cattgcatgcctgcaggcatagcgaatggccgaatcatcttctccatagtttctaatgtcagatatgatcctatttcttgcagcctctctggacccattataggcagtgtgtgctcctgatgcaatgaagtagctgcactacctttcttctgccaaccataacatactatattagctgctgttgaaaacacaagttctccatgtcaaatttgcatcttcactcatataatattcctcaagtaacgtaatggaattcacatggattggattggattggattacctccaggggagataaatcggcaccacggctgtaggtcagctctacacggtaccttttaggatcttctaaaggcacctgcaattttaaagtcaaaacaaagttcaataaataaattacataactcaattcaattggataactagttatttcatttcccaaaacatgtcaatctggtgttaagcttcaggtaatacaatatacttggttttatataacctcatttgcactcagctgaattccagtgggaacaataatattgcatagttcagtgcaacatttaaaaacgctgatcagtgttataaactttgcacttaggaatcatcacaagacatccagaggtctatgtcaggcatggtaaactatactactagatctactaaggaactgcaataacttaacctaacctattcatgtaatgccgaacacttgggaataattagtaattctacaggtaaatggccaaaatgactcacctctgtgttctcgaacatcctaagcacaatatggctcatatagtcaagctcctttgttttaactagtctctctagagcattacggcaaacaagactctcttcttcttgaagggattcttccatattacaataacgaagaacattcatgagagaatgaatatgcgattcctgtcaacaaaataaggcaagtgaaacagagtaagaagatcaaatttacagagcaattctaagccacaaagtcttatgaatcagtcttcttgaccgtatccatttagataaatgtatttgaagttgagatttcaatataactaaataattttgactagttaaaattagttgtcatatgagctttgttattattgttctgtttaagatacaatataatgaatcaatacaatatgaaccaaataacttcaaccaaatggattcatactacggagacatcatgtaaaataaaaattctgcttaacttcagagtaagaatgtc

SEQ ID NO: 4119 - DNA, 1334 bp, Glycine max
tcgcatatttttcagccttgcactttgaaatattttgaataaaagcctttgtttttctctgtgacctcatcctacactcgacaaattttataaattatactaagcttcatttggcactttatactttcaggttggatgagacaaatgttaactacactcactcattttaaatgtgtactttgttccaaagtttgtctactgtcttctcaatagataattctctgaaggttattaagtgaatacacaagaatagtattatatctgtaacacactaacatcccctcattctagggccctttgggctgacaagaaaggaatactttttgttccgaagtttaacattttattaaattatttggagattttttatgttgaggccttgagggtgagctttggtgaaacggtaagtttgtggtcatatgatttgagatcatgttttcaaatcttgaacgcggtctctcttcttgcaggcataagactccaccggaccctagttggtggagccttgtgcactaggttgtgtcaattgaaatttaacattataatattaggagaattttccctatggcatgcctgatcaaaattattacataactggtcccaagcccaaataaaaaagaataggttttgtgttatgtaattgacaaccaacacaaaattttgacaaatctgtatgactcggatagagacaatatgattgtgttaatgctaggtttatcataaagcacataggtgtttgatccatgtaaccaattcacttagtggaaaaagactttagttgttgttgttaaactattaggtgaaaaacatgtgaatggttttatatgtttattatcatgtcaagtgttaaaacaagaatttttttatcaagacaaattttgatagacattgaaaagccttactgaaatttcataactaagactctgatctaccagaaatccagtacctatacatttattcacatgcaatcatagacgtagtagattttctctcgccttgatggtcatgtgtggttgaatccttagatttgggtttttagctttgaaggacacattgttttactgctctaacatggaactgtcccatcttctttacataagaaagtatatatttgaacagaatcagcatctctaattgttgtgccacaaagagtgtgtaccctggaactagaatctttaggtaattgtggtgtattctgtttcaatctaggtttactaatttgtaattgttagctattatttcaattgcaaatatgtgctttcaatcttctttaaatagtctaaggcaatgacccatttgccctacttttgttatgcatttctttctggtattcc

SEQ ID NO: 4120 - DNA, 1132 bp, Glycine max
tctctagagtcgacctgcagcttttaaaattggaattgaatctttacgttaatggcatgcttcctttctttcaccattagaagtaaaactttctccaaatttaatatatacatgtcgtgcagctttttctccgataatcataagttttcaaataatctttctccaaaaattggtattcaacaataataaaatattgccaataaaacaatacatgcagcggaaaataaaattcctaaatttcataattaggatttatgcataattgggagaaattaaattatccctaaatttcataattagggttcatacataattgagagaaactaaattatctctaaatttcataattagggtttatgcataattgggagaaattaaatcattcttggagaatcataaatttcataacacatgctctgataccacatgtaaatattcttaaggggttttctaaactatcaattatagaaaaccatcaagatcttaaaacctatgattctcacaaacaatagataaacagataataatgcgtacctttctccataggaagacttctctccggtgtactttaatttccttaaaagaggagagaaataagatttcacttccttgggcctttcttttctgtctctctccgttcgtgatggctatgggtgagagagaacacttttctgatcaggaaggggactttatttcacgttagtgggtattaagccccttttataaccattactcccatcaagtagcagttagttctagaaacttctcatattaagtccaattacaatttaacccttaatcgttaattatttacttattagttcctacataagtcacatgtctctcatataagacattaattcttacatctttgtcacattctaacaaaattaacatctaatatttgtggataaaaataaaaaacactcagtagtttccaaatatactttagatagcttctttaaatttatttatatacaaatgtacttaagatggttggtacatacaagagctaacatgtcctgggaaacagcggctttctcagatagacatatactggttgctatgcgtgtctcagagcaatggtttggtcttcacagctctgccataaccagtttctgcaggcatgcaa

SEQ ID NO: 4121 - DNA, 991 bp, Glycine max
gagtatcatgagcttaaaatgctagaacaagagatttcctcctacaaggatgaccctgacattccatgtggagctgccttaaaaaagatggccagcctattagacaagtcaaatatatctatctagataatgttcttatttaataattactgatattgcatgcttactctgtccctcatttcatctcattgtgataggtctgagcggagcatacaaaggctaatcaagctacgaagttcagtcacacattcatatcaaatgtacaacattccaactgcatggatgcttgattctggaataatgagcgaggtatcattttttatgcttttactttgaaatgggaacattgaataaacatagtatataggtctgaaatgagaacaatgttcaacgttcaaattttatttgaatgatatagtgattgtttaagctagtctctctatataactcttgatgtgaactgctttgtataaggtatagttgggtggatgatgcattttgtgaaggatgtgttactctagagtctgtttccttcacgatttagaagttgatgtggctatccattttgtttgttgtggcatattatatgacttcctctttacaaatagaaaggcagtttcatattcaaacatgaatgttacattgtcattgattacagttgtctgtatttatataagacaactgtaaaaaatttagataagcatgcttgtttcttctctcaagaatttttatcttcccttgttatctttgtgaattgataggaaagtatagacatgctaaatttacattgtaaaatttgtgttgatgagtaacaaaccatctatgcagataaagcaggcttccatgactctggtcaagacatacatgaaaagagtgacaatggagcttgaatccattcggaattcagacagagaatccattcaagattctcttctgcttcagggcatgcattttgcatatagggctcatcaggttttttttttttaccact

SEQ ID NO: 4122 - DNA, 1055 bp, Glycine max
ttgcatgcctgcagcatttcacgtaactctaatagagccttatccagaagcaagaagtgaacttgatacactctattaattgacccatcatagcacacaaacggcttatgctaaatgtacccaacattattattatgcatctaacattttaagtgaattaacaaaaatgtcttccactcaagttaatccgtactagttatatggatcaagttgatatacatgactcatacggatcaacttgatccatatgaatcatacgtgattcatatggatcaagttgattcgtatgatttatacggatcaacataatccgtatgagtcatacggatcaagttaatccatatgtataaattatatttacaaatcaaattcatccgtccaaatcatatggatcaaccataggataatttgcacaaactttacaagcaataaagttgatacacctaacatcacacatgaatcattaagtccaaaacttttcaatatgagtagtttagtaggcgtttaattgtattttgttttcctaattttattttctgtttccattttttaagtacaaaattgtcacattgttttcaacgtgttttctatttttaggttttgtacagaaaacaagaaaaagttgattttagtatttcatgtacaaatctttaaaaataaaacacattaaaaatttaaaatatgctgacaattttttatttaaatattaaaaatagaaaacgaaacaaaacaaaaagtaaaagtaaactcccccttagttgccaccagatcgcaacttaattgccttttctcagcatgaacttattagcataccacattttacacactgacttattttaacataccccattttactacacacgtattgaatatatcgcaaatataatggtagaactttgaagatgggcatcgtgcacaatataggtgaacaacaaaagttagatgtactttcaattttaaccaaaaaattgccacaacaggcattcctgcaaggagttagatgtatcacagaattctcagtggcagtgtcatgtgcggagttaaatgtcggaggc

SEQ ID NO: 4123 - DNA, 1033 bp, Glycine max
ttgcatgcctgcagtctctatcttgtcctccatgttgcacaacagagacgccgctaaaaaggaagaagggaagcggttgcgaactccttctgctcagacacaggaagggacgaaagaatgtaacgtatggagaggaagagatgatacctagggttttgactaatgccttaagtgggccgggtgggaaaaactaaacaaaaaatatggatttgttatttccacttcctttattactaattcaaattatatttcaccatcaataatcaataataataaataaaaaacaattacaaaatgatgtaaattaaaaaatatatattaatgagttaaaaaaattgaggaaaaaaatgaaattgaattttgttacattatattccaatttaaattacttatcataaatataaaatactattatactctatatggttaaatatattatttattattaattttaatcatataaaaaaatatttatcatgtccaattgtaatataaaatttatattttaattaaaaaaaattctccctctaaattgtgtactttaatttttataatatagaaataaattataggttgaattacctgcttaatcttttatcttattttttttcaatttgattatttatcttttaaaaagtttagtttgatcaaaggaccaaatacttcatttggcctgatttatattatatctataaacataatttagtttggattaatttttaaaattcaaactagtgttgttaaaatggttagtttttttttacaatttttaatattttttatttacatcaattcataattattttttacctattgttatttgatgatgaaatataatttcaaaatttattatagactttagagttttactcagtcttagtttattttttgttttaatattcataaaatctgaatgcatgccaaaagcccaaaagaaacgctagcctgcattcaatttccttgtttggcgttttattgttttgaaatcggaaccattgaattaatccaacggctcaaacatatgctgcaggca

SEQ ID NO: 4124 - DNA, 1134 bp, Glycine max
ttgcatgcctgcagcccgtccatttgtaactcatcacaatgatcttaacatgaggttattcatgaggattgctccagaactgtatcttaaggagttggttgttggtggactggatcgtgtttatgaaattggtaaacaatttaggaatgagggcatagatttgacccataatcctgagtttactacctgtgagttctatatggcttataaggactacaacgacttgatggatataacagagcaaatgttgagtggtaagaatttaatgggtgttttaattttaatgttgatattgattctctttcatcatcagcttcttaatctcttgatgtgaaaaccattaaacaggtatggttaaggaacttaccaaaggcagctataaaatcaagtatcatgctgatgggattgacaaggaacctattgaaattgactttactcctccttttaggtgtgtggcatacattatctggtcactgatggtcattataattctattctatttttgaatgatagatttggatttttgattgttacagaaggattgacatgattgatgaattagagaaggtggcaggcctaagtattcccaaagacttgtcgagtgaggaagctaatcaatatttgaaggacacatgcttgaagtatgagatcaaatgtcctccccctgagacaactgctcgtttgttggataaagtaatctcctttctttagttattatatactttgtttttaaatattgtttttatctaaaagattgtttacattccttttccttgtcagaatgtatcaaaatttttaatggccttgttttccagtggtattttctctcacacttgttttgttgttgctggtctgattacgaccaggacaagagttcagatgttggacgtaaaagcattagttttgtgtgttatggttgggaaaatgaaatatatatatatatatatatatatatatatatatatatatatatatatatatatatatatgaaggttgggaggggatagaactatagtctgtagacattctaggctttgtaaaacaacagctagccattgtaataatataactgtaatttcctttccagttacccaacgtttgtatttagtgagctgtaacattaatttctataa

SEQ ID NO: 4125 - DNA, 1304 bp, Glycine max
acacagaagtcaccaacaagtggtgattacttacccatattcaccaaagaaatggaaaaacttctagaagttgtgacaaaacaaaactggggaactcactctgagggcatgtcatcaacaacaaccactcctatctatggcttggcacaatgcttccaagacctttccagcattgattgccttcagtgctttgcatccagccgcaccaagctccctcgctgcctcccttcggtttcggctcgaatttaccttgatggttgcttccttcgctatgacaactacagtttctacactgaggacactgaccctttgagggacacagtgaattgcacctcacagtatggttctgtggttggtgatggtgagaagttggtgtttgctgagagtgttggcaaagtggttgagagtgtggtgagggtggctgtgaataataatgagggaagaggcatttttgcagtgggagaaggtgggggagtttatgccttggcacagtgctggaaaactgttggggtaaaagggtgtagtgattgcttaaggaaagctgaaaatgaagttaaagggtgtttgcctaagagggaagggagggccttgaatactgggtgttatttgagatattcaactgttaagttctacaatcaaggaggtgaagatggccaaggagatggtaagagtgttgttcttgtttgaagtttttatattcttcatcagtttcctgattccgtttggataaacttctcaaccagtaattataggagaaaaagatgaattaaacatctcttgtaagttaaaatcaaacttttatgtaaaaactctctcgtttaacttttccaaaagctggggttcataagttaattttaacttactttgattcactttgctttttgttttcttcctctgtaagtgtttattgagaagtttatccaaacttgtggttgggattgggaagctgaagctcaactgggaattacaattatatttttttaccatgcactttcaaattccttcacctgtttatagaatatatgacaaatagagagggaaagaagatggagatgaatttgttattgtatcattgtaacttaaatgctgcttttcaacttttaactatactactacgttgctataactcttgggttagttttgttgttttaagtttattttagttcatagatggcacagatacattaagtctttttttttatatacatgttgacgcaattgtccatgtttcatttttcagattcttccagaaaacgagccatcgtagcagcagggtcagtcttggctgcaggcatgcaagttgg

SEQ ID NO: 4126 - DNA, 1062 bp, Glycine max
gtgacccatttttggccaagaatgtggaagtaaacttctgttgtgtcattgcagtcattacatagtatccaaacctgcaatggagtcttttggtaagaagatgcttcgttatattgatatatacatgtgtaattgatatgcacaagaggattctgtttcatttcaacacatcctataattacataataaaatggcatcatccatatattactcgggtagactttctcgtaaatatcaacttcatttctttatataagcataaagaacaaaaaggtgtattcatgctcaaaagcacctttcatggccaagctatagggtaggtctggacaaatataataggttttcgttttccattcacagctggagataaacaggtagttattagaagcatttcaaagagtgaaccataccttcctgtttcgataatcttcaggcatgacagttgcttcaatctaatatcacaagaaaataaaaagatcagaaaaaaatcctaactcaactgaagcagaatatttatgtaagcaatattcttgactagctaattgcatgatataaaatctataaatcaattaaaggaaagcatccatgcgctttaatttaatcagctacctcttcatcaattctcttccacgtcttagacatgtcaatcactgacttggagcatatgggacaacaatatctgagccatgtaccaaatcaagttacttgttaagcagatgtcatgtttatagaccaaagaattctcaaagatttaagatactcacttgtcattttttatcatctctacgtaacattcatggtgcattgtgtgaccacatttcataacaatggtgtctttcaatgaatcaaaaaggtactacacaaacataataaagtcccatcaatagcatgttaatctaaagttcccaatgacacaaaaaagagattctatgtttggctgagaacttaagccagggaaaaggaggaaatgaagcaggcacctcgtaacaaatgggacagtgatgccgcatggagttctccacacacaaatgattatcacgcagaccaattgcataacaagat

SEQ ID NO: 4127 - DNA, 1162 bp, Glycine max
taattgcaaatttttaatattgattaactctagttaataatactgttgaaaaattaaataatgtggcaaatgagaaatagaaaagaaaaagagaaaaagggacagatatgataaatgatgtaatgagaaagaaagagacagataggatgaaaataaattgaaaaggagatgagaagaaaaaacgagtgtatgattacatttattctaatgtcttgatcaggtaacagtgaaaactcacatataaagtaagactttggccacattctgatagatagaaaccactgttctttttcccacaaatgatttctagaacaagaactccatagctgaagacatcagatttcactgaaaacaatccttccatagcatactctggagacatgtatccactgatggaaatcattaaaactttgttaattctcttatattaaataataaataaccaacaatttcatttttcaactaagtgcttaaagttagatttatgaatcctattgttaaaaaaatgttaggtacaagtagcactcactaggtgcccattactcgttttgtatttgcctggttctggcctttttcaaatgcccttgccaatccaaaatctgatattttgggattcatttcatcatctaacagaatgttactagctttgagatctctatgaataactttgagtctagagtcctcatgaaggtataaaagaccttttgctatgccattgataatgcttaatcttagattccaatcgagttgccttttttttctctcatctgacaagataaacacagaagaaatctcaaccaaaaagcattatatgaaggataaagactcaaggaaattgacaaatcatgaattgtaagcgtgggccttagaatggaaaaaaaattaaaaaatgtacgcagaacaaatatttattcactcacttttctagagatatagccttttttaccctgaagttatcttaaaacacggtaattgattacattagcttcaatttagtttcacaatatgaacaggtaaaagatgtgtcataatttattggatattaatgatataaatagcatacgtacgaaaacaattggtgctacctgctaactatatataataaatttccaccctacacccaactactttaatccccatagcagcaacatttgacttgtct

SEQ ID NO: 4128 - DNA, 1185 bp, Glycine max
  misc_feature (1160)..(1160): n is a, c, g, or t
  misc_feature (1169)..(1169): n is a, c, g, or t
gttgttgtttcagacagttcaatagctgttccaaagagatatccctggagtggacaaattgcagcaccatttccatttgcttctgtgccttctattggctttccactgagtgttattatactcgcatggctgcttctcccagtgctgacatggctgcttctcccagtgctaacatggctagtcctccttgatgagtcaatgctaacatcatccttggtttcagctcctagaactttctctagctcatcattgatgagcttcagatcattctcagtgacttcatcttctttttcagttatgctctcaacagaaatgggaaatgatggtgttgttgatgggtcggatattggttctgaaccaagagttccaattgcaaggaagccagggaagtattctccctcatagtcttcatctacccttgctgcttctacaccagcaaaagagtttctaaggttgttgtgacctttctgagcatgtttggaaagtttgaccccaaggcttggtttctgatatacttgttcatcatcaagtggtgcctgccctgaaagacaattgcaagaattccctgaaacaaacaaattttaaagaactatggtaattgagaagcataacatgagaagtggatttccatgatagcgttcagctagctagactcttcccaattctgatcttatgctagtagagattttatggatcttattactcttgacagctttttaaacagtctagtttttatgttccaactttcaattctagccagtcattctactttattttcataaatcttctaatttaatcatagcctttcaatttcaatgtttgtacctaggtggtttactactgtgtcttcatgggcctacatatatttgtgatcataagtgtatgcaagagagtatttgaattctccttaacttacagttcaaaggtcatcatcagaaatcaagttatctattgtgtagtatggtaaattttgctttaatgtagcgccactggttttttactaatttcatggccatcacatagttaatgcatgtatggaagaacataaatatgtagcttgctaacagcatatgacttaccaatgaccaagtccttgaatggctcactactattctggcgaagtttcctgtgcatccagcctagtaactgcaggtcgatcntagaggatnccaagggtggccgagt

SEQ ID NO: 4129 - DNA, 1242 bp, Glycine max
attagtacacgttttctttgtatgaatcaatcgtgcatgggcactagtagaatggatttcataattgtaatttgttttcctggtattgccatattttcacagcttgtgatatagcaataccaattatcttaatataatctattttttgtttctgaaagaaaaaaattgttaaatcttacccatcatcctttcagcatgttgcttcccttcttgcttagcgtactttttttttttttttttttttatcaacaatagattgtttagcatacccactagaattttccactacttgttgccgaagcctttgagcccacctttgtctgcatccattgtcaaaacaatcatccctctagtgaaggagtctaggcaacattcaaacagacttattttttccatcatgatatcgttctattgttctaattgacgttcctttttcttcttcttttccatctttgactaatcgtattctatgtgccttttgtttttttcttcttcttttccatctttgtttttttccttgagccagactctattgatttttagagtccgggtgactctgaaaatcatattgatattcacatatatcacatgtctatatacgttgtttctatacaagtagggcttgcgtaaagaaatagataaaaaaaattagaattgttaatttaataaggataactaagaaatcctaaatcgttgtcctaattattgcaactaggaaaatgtaaatcatggtcccaattacagtgagtaggaaagatcctgattacaactgaaaacaaatctattgtcaaattgtaactagaattaaggtacaataaagatagaagcaaaactttcctcattaaacacgaatcctctttcacattgttatccaaatattgattaatgctagagcagaaagaaatgaaaatcactatgtacccagttccacatataggcgacaaaaaaaccatccattgttgttacacaaattgtgtcccagcaacttccatgtccctaatctattctctttttcaacaacgattggtcttgtgattctgaactattgagatcatcatctagttttctttttctacaaggattggtgaattggatatccttcattcttgtttgttgtttcaatacatggattccactttttctaaggattgggacggaattaaaaaatttatatacaatctctgcatggttccattcattttctaaaagtgcttcacctaaatcctctttgagttttatctt

SEQ ID NO: 4130 - DNA, 1253 bp, Glycine max
aagaacttagaagggagattgaggaggccaacgaggagcaagtacttgctgaactggccaggattgaggcttcgaaagaactgacagatattgagacccagagaaaacaggaagcaaatgaattttcattcaaattggaaagcacgaggagaaagttgaaggaggccattgaagagattgatgagtcaaaggagcttgaaatgaaattggctgtgacaatatcagatgttgatttcttgcagaatgagttaaagtcagttaaggaaatggataaaagggttcaaggagatgggagtgcaaagcaattggaaggaagattcaaaaaaggggaggaatcagaagactctatagtgttacaaactataacagaagaattggaggcagctaggaaagaattagctttggttagagaagaaggtttccagtttatggcctctttggatgtcataagaaatgagttgaagcatgtcactgctgagacagataggttgaagaagaaggaagggaaagtagactcaacagttcaaaatctcaatttcaagattttgagagcaaagtctaaattagaagctgtgtctgctgctgaggaaaaggccagatccatagtcatgagtctgtctcatactcttgaaaagctgaagacagaaacagaagaagcaaaaaaggaaaatgaggatgtaagccaggaggttgcagccaccaaggaagaaattcaaaaagttgagttggatatagacacgaccgaggaaagattgcaaggcgtcatgcaagagctagaagtagccaaagcatctgaagctctagccttagagaagctgaaaactcttactgagaggaccatgagagaaagagctttaacagcacagcatagttccatgatcactatctcaaaatttgagtatgagtatctaacaaatcatgcagcctcagcagaagaaattgctgataaaaaagtagcagcagctgaggcatggattgaagctctcaaggccagcgagaaggaaatactgatggaaacaaaaatagctcaaagagaactcaaagaatcaaaattggagcaagagctggaggtttacaccaaagagaagatgctttcaagaagagttagtagtagtgaggagcttgacaattggccaagaaaacgcgagaagacttcatccaagaacttccagagagccttgtctagaaagagcatcaaacttaatggcactataactcctgcaaggggagcaaagtttcagaagactgcttca

SEQ ID NO: 4131 - DNA, 1018 bp, Glycine max
cattgcagcaatctgttgccagcatcggttggcctcgtcgtatttccacaccctaagacttgcgctttccaagaattctgatagcaaaacaacaagcatctcaccaccacactccacaatatcaatggagtactcactgaaaacaggcagcaacctggggtactcaaggaagcaccttgatgtcaaattgcaagctactaccgtccctgaggagctgagaaaatacactgtctcctgaccgtctttgttagtaataaccgatgaatattgcttagacgggcttctctgcatgctactagctacaacagttccagccttgctaaggaagtacacaacattgtcatcatcggttgaatcacaatccagggaattgtcatcaacattcctcctcagcgcagcctcatcttcccaacagctagagctagagttgtagactttaaacaaaaggttagggagttcaccgaagactaacacaatcttgtaggacaattgatcattgaaagttgtactcatcacaaccgcgttgagagactggttttccagggcaaaatgcaatggagggagttcgctacaggatccggtaacgggattgcacacaacaaagtttcccaacagtttgcggtagcaaaccagaccaccagaggctgcaacaggcatgcagctgatgttagagtcttcgagcggaagatgcaggtgattgagtcttttccaactgttttcagcagtgtcgaagacaatagattggttgagattgggagcaaccatcaaaaaccaaggatcccgcaaaggaactcgtgagcaggcaagcttgaaactaacagaagcagcagctgatttccacctcttgcacaccgaagtgaggcgaaaaaatgaggaagttggtagccatgaaagtaccctctccaagagatcttcattaaggtcatccagagaaaagctgctgaagagtaaattgtctccactctctggagactttcttttcaaactatgttccattgatcagaaacttggagcaaac

SEQ ID NO: 4132 - DNA, 862 bp, Glycine max
cgccagcttgctgcctgcgggattgtggaaagcaagtatatttgggtgagtattacgatgtggatgattgcatatgtggtagttgttgttgttgttgttgtacacttgtgctgttttattttaataatgttttgttttggatacaaattgggaggcagactaatttttagggatgactgacgagatggttttgtctgggtaaatttgtgcaggtggatttgacacagcacatgcagctgctcggtgagcacttgctccctctcttcctattgttcagcttgtaatataagttttctacatcttgaacccaatccacataaaatttcgttttcttgcatataaatttaaggttcggattaataaaagtatttattttatctgtattgctcagtgcgtatgatagagctgctattaaattccggggagtggaggcagacatcaacttcaacatcgaagactatgaggaagacttgaagcaggtgagtcatcaagagagagggagggagaatctgtggaaaggcatttatcttatctcgaacagtcgcgtgataccttatcttctacagtttcttaatcactagctattagtattttatcaatcttgaatgggtatgatttggctaattaatgttgtgttaatatagatgaccaatttaactaaggaggagtttgtgcatgtacttcgccgacaaagcactggatttccagaggaagctccaaatatagaggcgtaactttgcataagtgtggaaagatgggaggcttcgatgggcccatttttggccaaaagtagaaccaaaccatactcattattatctatttatggacagggcattctggggggggttgtcatgcctgccca

SEQ ID NO: 4133 - DNA, 1102 bp, Glycine max
gtttcgccagcttgcactgcctgagatgaagtaattgctgctgcggtgctgctccggcaccgccttgtgctggtgcccggccaccaggtagagcaaaagatgtcactcactctgttcatgaaaaatgggctcaaggtcaatgtgcatgagagggatttgagaggggttatcacaagtattaaaaaggaaagggaggaagatgttgatttgagaagtaacgaaagttagtgtggtgttcaatagatgaagcagagggtgttggaggtttttgaatgtggagacaagttcaaatgagaaaaattcagaccctggggctttagcttatagaacaagagaacataatttccttttaagaaaagggtatattcagagtatttataattcttatgataaattgtggatggattctttttccagggtcgtgggatggatgattgctttctcaatccatcgttccttgtagaatccttgcaaatattcattgtattctttatttcttgtcggttttgatgtttctatttaattttactggtggtgagagctaaactcacatttcacaatgttgaatgttgatgttcataaaagaatgccttacgttttatgaaagtataatgatcggatttgactcttttgtcatatataatggatgatgcttaagtggtagtggtatactcaaaaactgcaaaatttagctttacagttcatctgcattttttggtgaatattcatctgtgattttagattctgtttccaggatccttgcctatgacaatgaaattgaaatgcacaaattgaaccagtagtaaaagtagatatactgatgtcttttgttaggggacattgaatcagaaaactgtgcgaccaattttctcagccatgtatgatgaagaagcagagttggccatataacatgtattttaactttaagcataagtatgcttgagttatataagtggacattatccaccatctatacagaaaccatttagatcatgggacaagacatttgcaaaaggtgcctagttaatccaagatttctagataaaatgtaaaggctttcagctatttgatcaaaaactttgatggttgctctcttcgattt

SEQ ID NO: 4134 - DNA, 1206 bp, Glycine max
  misc_feature (1187)..(1187): n is a, c, g, or t
  misc_feature (1192)..(1192): n is a, c, g, or t
atgtattaccgccaggcttgcatgcctgcagtttgcaactcgttcactttgatgattatgggaaactcttgcaaagggaaaatgatgtgttggtttttatggaggagcacattcggttgcgattccaactgtccaagataagccataggttcagaatttacttgcttctacagttcttggtggtcacagctagccaatttgtgactctattacaggtctctggatttggtggagcactgactttcataagtggtggagattttgctgtaagttcagttctctgtgttcaatacggtttatgactttgtgtttttaaattgaaggacttgattacttttcttttggtcgagttgtcttgcattcaaaaatcaaaatgtttcagtccatggtgagcttttcattgttgttttctactttttttaaagtatcaacttatgtatctttgttctcgatacattctttcaggttttcacacttgttaaggtggttgggattattattgttctgcatgcagcaacaaagatttcacttagagcacaggtcattgtttcccttgcaagcaggtggcatgcgcttgtaacatgcacttctgatccatctaaactgagatattgtgctagtacagggagcttggaagctgcaaaacatttaaactcaatatttttggattactcagaaagtgatctagactcatcagattacattgttgtgccttcaaatacccagttagcttctcatatgtcctcacatcacaagagacaagcctttggtacgtaatacaaccttcagtcttcatgctgttgaaattttcatctcaagctcttgtgattattaattagtgatggaaagacatgcttagaagaagcattgattcatttaatttttttattgcagctcatacattaattttattctctttttttattcattgaccatgcagagatttacaatgataaatgttttttttggcatgattgaaaactacttttatgttacttgctaaattataagcttgccaattttatgggacaaacagagactattttatgtcaatgcataatgattaaactttttctttttatcctgattgaaactattgaatgtagactataagcatgttttagataaacatgaatcccctgcttatacaagcctttgaatgtgcagtgatgtatctgcaggcatgncaagnctgggcgtaatcat

SEQ ID NO: 4135 - DNA, 1182 bp, Glycine max
agcttgcatgcctgcagatacatcactgcacatccaaaggcttgtataagaagggaattcatgtttatctaaaacatgcttatagtctacattcaatagtttcaatcaagatagataaaaaaaagtttaacgattatgcattcacattataaaataattttacattgttgaccaattaaaaacaagttattgtttgtctcaaaaattggcaagctgataatttagcaagtaacgtacaagtagttttgaatcatgccaaaagaaaaatcagttatcattgtaaatctctacatggtcaatgaatacaaaaaaaaaaatttatgtatgagctgcaattaaagaattaaatgaatcaatgcttcttctaagcaagtcttcccatcactagttaataatcacgagcttgacatcaaaatttcaacagcacaaagactgaaggttgtattacgtaccaaaggcttgtctcttgttatgcgaggacatataagaagctaactgggtatgtgaaggcacaccaatgtaatctgatgactctagatcactttctgagtaatccaaaaacattgagtttaaatgttttgcaacctccaagctccctgtactagcacaatatctcagtttagatgaatcagaagtgcatgttactagcgcatgccatctgcttgcaagtgaaacaatgccttgagctctatgtgaaatctttgttgctgcatgcagaacaataataattccaaccacttgaacaagtgtggaaacctgaaagaatgtatcgagaacaaagatacataagttgatacttgaaaaaagttgaaaacaacaatgaaaagctcactaaggacttagaaacattttgaatgcaggatagcttgatcaaaagaaaagtaatcaagtccttcaatttaaaaacacaaagtcataaactgtattgaacacagagaactgaacttacagcaaaatctccaccacttatgaaagtcagtgctccaccaaatccagtgacctgtaatagagtcacaaattggctagctgtgacaaccaagaactgtagaagcaagtaaattctgaatctatggcttatcttggacagatggaatcgcaaccgaatgtgctcctccataaaaaccaacacatcattttccctttgcaagagtttcccgtaatcatcaaagtgaatgagttgca

SEQ ID NO: 4136 - DNA, 1192 bp, Glycine max
caaatgagtcaaaacatatatcattcaaggaaacatgctaagataaaataggatataatttataaatatttctagaataattctataagatgggataaaagtagaaaaagataagaataggacaaattatttttctatataataatagttgatatattaagagagtcaaaccatatcattaaaaatgagtaaaaatttgtctaaaagagtactgtaactcaattagataagaacatgacaatttttttttatataataatagttgatatattaagagagttaaaacattattaaaaaagagttaaaatttatctaaaagagtataactcaattaaataaacaaagatatatgaattgttataaatttgtcagaatttttaaattgagtcatgatataggaatagaataatagtataataaggtaactgtatgataagttgttttactacacaatatttgatattcagagagggtttgaacatataattcgctggactttatgggataaatatgataagataaaatatgatataagaatggaataaaagtagaataagataagaatatgaaaaattattttaatattaaatgtttgatatatacattaagaaataggaagcatatttaagtaatttttattgcaagaattataaatatagatgactaatatattaaatatttattttatattataattaaaacttataataaataaatattcttaaatataaattatattttagtttatgataaataatttatattattgtataggactatttttgactattaattaatttcttaaaaagtattaaaatttaatgatggtacaatacatatgttacaagaaatatgttcatatagctcatcaaggtctaaagccgaatatggtttaataatggtcacaaccatttccactcaaacatttatctgttcatgtagaaaaaataaaaaagagaatatatattctgtcagtgtatctataacaaaatgattacgcagatactaaaatcttgactagcacaaagcatggtaaggtttctatatttacaaactcagcagctagcagagttttctcgcaaggaatacaacaatggaattacaaagaagaatttttgcaggtatgtaagcattgaacgctaaaaatctagtggcatcagcttggtgtagaagtatttgatcacggaactgt

SEQ ID NO: 4137 - DNA, 1200 bp, Glycine max
cgaaatgacacgcttgacagcagtctcaaggcggtccgcgaatgaaggaaactgtagatgcctgagcatcatggcggaggagagaagcagagcaacaggatttgccttcttctgctccaccatcttttcctttccgacatttcctgcggaagcaccttgctcaaacacagcatgatcagccccaacgttccctgcattgcaccaaccatttatttacttcttattcaatagaatgaacgattattattgtatttgtattcaattacctccgggcatgaccccagtgccaccggcaattccagctgccgtattagccactagatttccatagagattaggagtcacctgagataataacacgagaagagatttagattggaaagggaagggaagatgatactatagtaaccaattaactaactaaccataacatcgaactgctctggtttggagacaagttgcatgcagcaattatcgacaataatctcgttgtacttgataccaggatatttggtagctacatgtcggcaagattcaaggaagagaccatctgcgagtttcatgatgttggctttatggacggcggtgacttgcttcctgttgtttaagtatgcatactcgaaggcatatttggcaatacgttcggagcagaacttggacataaccttgaggctctcgacgacgcctggaacgacctcgtgctcgagaccggagtactctccctcggtgttctcgcgaatgacgacgatgtcgacgttgtggtggcgggtgggcaagccgggcaagttgaagcaattgacgagggaagcgtagagatcgaggtcctttctgagctgaacgttgagggagctcacacccccacccaccggagtcctcaaaccacccttcaagcacaccttgttcttccgtatcgaatccagcacctcctccggcacacgcctcatgtccccgtgcacatcgtacttctcgaagtatatgggggcgtgcatcgcctccatcacctgctccaccgcatgagtcaccagaggcccaattccgtcccccggtatcagcgtcaccccccgcggcgcaccgtcccccggtcgaggcatgtacgtcacgctccttcttatttccttcatcccctgctgcaccactgacgctgacattcttaatttacttcttagccccatctctctctctctcccgatccgatctcac

SEQ ID NO: 4138 - DNA, 947 bp, Glycine max
ataacgcatgcatgcaacaactcccattaacactttcactctatgattccatggtggacctgatgacccgataaccacatttcaacattctcttctcttgtccattctgttataatagccctgaattttctgctcctacaccaccccagaactctaaaaaggttcttgtggtgtaactttgacagaaccttacattcttcgacaaatttacggtaactatccctcggtatatcatcccagtacatctcaattttcacttcagtaccatctctcaagatccctttgtagatgtgaacaacatcactctttcctaccaaatacttatttgaaaaatcatcaattgctgcctttagaattgccggtgtaaacctcctacttctttgaagtttacttggtagaaaatcaggcctttggaaacaaagccataaaaagcaaattaccatcaaaatgacaaggatgggaaagccaaccaatagaaaaacagccttaactgtaaaccttttttgatccaaaagagcaccagaatgaagaaaactagaagagttaaaccttttggagaattgggaatcagagagtttactctctgaaaagcagttataggagcggttgagaaaagtgaggttgataaggggagagaaactttgaattggaatgtcaccagaaaatgcattgatacttaaatcaagagactgaatttgggtgcaatggagaacatcaattggaaaatcacccttcatagaattgttggacaaatcaatggacataatgcttaagggaaagtacttccaaaagaaatcaaaggacaaataaagaggtgcaatgtttggtcggtttctaagatcaactttggggaatgactccacacaattagggttctttggttcattgcagagatagcttgcaacaatagtgaatcctaatatttttcaaggtccatcatgggattg

SEQ ID NO: 4139 - DNA, 1178 bp, Glycine max
agccactggctttaccatgcccttcaggaactccatcatccatgaccaatccgtgccaactaaagggaccactaattcatgctgcaatgtgtggttcagagttagcatattggttttaaagaagaaattagattccatgatacgctagctagctggggagtggaggggagagtaaacgttgctttaatcacagcatcaacatgcatctatgtatatgtggaagggcaaagtcagaaacgaccttccccagaatgtgtgtcaccacgtggagtcactaacctttgcctctggcgtgacacagcaacagattcattcagcactattttggcactttcttattttacttatcatttttttaactatcaaatttcatttcttcttcagcaaagaaaaatagaaaactcttgggtcaatccatttgaaaggtcgtgtatggcgtgtattctgttaacgtttcataactgtccaaaagaaaggttaacttttcatgcaatttacttgcagatgtagcaaagaactgggtcccttaacgaacacaagccctcaaagtttttaactttaggcaaagaaaaattctctgagattaatttaaagctacatttcagctcagattgtacaataagtgaatcagctcacaagcaatccaagttgagcccacaacaacaattatatatattgcaactagaagtcagtctctgtacattgaacatgattcattcagtatattagcatatatcattgtttgtgtgagtgtgcataacttatagaatagtggcacatgaacacttcatcactctaaacatcacattagcactaattctttctttcgattgagtttattaatggttctgcactgttagtaaaagaaaatttatacgaccaaccaatcagaaatcattattattggtataacttttataatgatttcagattgaatgaacatagaaaatttctgtgggtgtataacttttttttttaatcttctatcatattatattacttattatattttttttctctcatattttcaggtacaactagagtgaagtgttcaccaatctttattccaacttacatagacacatattgagaaatcaattaatgtctgagaaggaaatggaagcgagtaataaagaaatgattactttcagcgatgaaatagtaaagcacaaaaagaa

SEQ ID NO: 4140 - DNA, 1183 bp, Glycine max
agccactggcttcaccatacccttcaggaactccatcatccatgaccaatccgtgccaactaaagggaccactaattcatgctgcaatgtgtggttcagagttagcatattggttttaaagaagaaattagattccatgatacgctagctagctggggagtggaggggagagtaaacgttgctttaatcacaacatgtattatgtatatctgaaagggcaaagtcagaaacgaccttccccagaatgtgtgtcaccacgtggagtcactaacctttgcctctggcgtgacacagcaacagattcattccgatcagcactattttggcactttcttagtttacttatcatttttttaactattaaatttcatttctgatcaatcacaattcacggctaatatcatcgtgggaccccagccacatacattatattattttacacattttattctagttaagaaaataaattgaaaaaatcaaataaaaatgctaaaaaagtaaagtaaaaaaagttttctagagtgttcgggaactttttttcacctgcaaagaataagaaatagagtaaaataattttatattgtgattgaattaggatgtaattagtaattagattatcagtgtgcaatagcctattttctcttaaattattttgcctttcaaaatatcgatctcaaagttcaaaaacaagcaattgaatttcataaacagttatgcgtagtggggtatttactagttaaacttgcagctcaacctattgtccaaatgcggtttggaacggcgcatgttagtggaagtatgacaaagtctttcagctttttagtttagcccttttgagttcattttattttaattaatttttatttgttttaactgggtcgtggtgagtttacggaaatgttgtggctttcgttttgtgggtcactgttatccttttccttttggtttaggtactctggattgtgcaagcacatgtcatcgcagcttatacatgtgatattcttttttcttcaacatttaacatgaatctcagttcgttcgatcaaatattctctcaagatcttaaccgttgaattaattattctgttctggtatcataatattaattttgtaaagatcttaattaactgttgaattagttattcatagcttacatgatcaagatctcgggtacaaaaaaaat

SEQ ID NO: 4141 - DNA, 1173 bp, Glycine max
aactccagccctggatgagttgccaaaagctcacatagcacaggtttaaaatcatcctgacatgaagtataatatataatatagttcaccaacaagatggataggaatataatatcaaagccaagaaaatcaacaaaaatggcccctaaaaaataaatcatactagtatcaaatgggaattgaataaatgacatatttggataatatcatcagccctgactgagagaaatttttggagtagccgaagaaaattaaataaaatgaaaagcaggaaatatgaaagaaatagaagcaaaatacctgagtaaggtacttgagctgtggttgctttaaaattgtgtatatctgagttgctatatcttttgtcaacatgttgccattgatccaataatcaataaatgttttcctaaaggaatattaaatcaaggaattaaacataggtattaggaaatactaattacagggaacaagaccattaagttataattcttacatcgagggaacttaaataaaccatgttcattttattaataatacataaggttttcaagctagaaatcaatcagcatactgcctgattgaactgaaatagcactctgcaacagtaacttctggtttaacaccaagcacaacaagagacccacagagaatctctcgggcaaacgatgtatggaaccattatcggggcatacgcttgcccgattgaactgaaatagcactctgcaacagtaacttctggtttaacaccaagcacaacaagagacccacagagaatctctcggacaaacgatgtacggaaccattattggggcatatgcttgcttccaccaacttgcctcctccttttaatgtttggttccttcatcttttgaccttggaaagtaaggcatcaaatattgttttatatgtcttagtaggaagaattgagaaccttcataattcaatagaagattgagaaagaaaatttagtgttctttcttttctagctaaaacttaaaaactattctgacatacttttcagttcagatctgtttgaaaaatcaatttagtaaagaaagttaaatcaaacagcattacacatatgttcatcatgtttgttgagaccagagaagtataaagctctctagaggaaaaaagatataaacatttagttcatggactaagttatattct

SEQ ID NO: 4142 - DNA, 1253 bp, Glycine max
ttactttgctcgaacccggtcttcctctagagtcgacctgcagtgatttggagttgtcaaagacactcttcttttttgttcttttgcagtctcttttgataaaaccaaaaggtttgttttccccttctctttttgaattccattttaatatttttcagaaatagttaataatcttatattgtataatgactaaaaaaaagtaatgtttgaacaaataagctagaaataaatgtttgaagcatatcttatacatcccctagttgtacttttctcttctctattagatttctttgccaaaaaatttcaaaagaggggattaaggaatgctaaatattgattttttccttttgatcaaagatgaagacatttgtgctctatttgaatgtgtatttcctattctaaaggctgagtgggaaacatcagtgacagctggtgatgtctcattggatgaggtacaaaggatttactagcatatttgtgcttttatttcattatttgcttacttttttgtaatgagaagctaattttttacttctgttctgattgttgggaattcgggttgttttgcagttcaagtctgaagtgttagactgggattgcagtgcattctttaatgatcttttgtatgtcaagctgagccatctaaatgtgaaggttatgatttgcatattttggagactagcacaactaatatcagtactaccttccgacattctgcttgttagtaattcctttactatttgtaatcctgttttcaattgtcttatgaacttgctttccttcttggaatttgttgttgttagactctcaccttcaacattggttggatattaaccttttacaaaatgcagcatgatgatgataagtgggtcagcaagataagggatctgtttgtattttttgcctcatctaaattgaagcatgcattccacgaacacctccattacttagcagcacagtgcagaatatcacctccccgcctcttatccaagtttttcacagaggaaggtgctatacacttattcccttttgtttgatttttctcatatcacctccagtttgtttcgtccatctatgcaaatgcaattaagttatatttttttttttcggggggggggggggggggaggggagagggagagggagttgatcgaaatcgtggttgtttgaattgatatttttaacattttatgaatcagaagtcagataaaattcaattggcatatttgatattttttggttgaatctttcgtt

SEQ ID NO: 4143 - DNA, 1148 bp, Glycine max
agcttgcatgcctgcagtgatttggagttgtcaaagacactcttcttttttgttcttttgcagtctcttttgataaaaccaaaaggtttgttttccccttctctttaatatttttcagaaatagttgataactaatacataaatatcttatatcgtataatgactaaaaaagtaatgtttaaacaaataagctagaaataaatgtttgaagtatattttacttcccctagttgtacttttctattctctgtattagatttctttgtaaaaaaattacaaaagatgggatcaaggaatggtaaatattgacttttttcttttgatcaaagatgaagacatttatacactatttgaatgtgtatttcctattctaaaggctgagtgggaaacatcagtgacagctggtgatgcctcattggatgaggtacaaataatttactagcatattggtgcttttatttcattttttttatactttttttgtaatgagaagctaattttttacttctgttttgattgttgggaattcgggttgttttgcagttcaagcctgaagtgttagactgggattgcagtgcattctttaatgagcttttgtatgtcaagctgagacatctaaatgtgaaggttatgatttgcatattttggaggctagcacaactaatatcagtactaccttctgacattctgcttgttagtaattcctttactatttgtaatccttttatcaattgtctaatgaacctgctttccttcttggaatttgttgttagattctcaccttcaacatttgttggatattaaccttttacaaaatgcagcatgatgatgataagtgggtcaacaagataagggatctgtttgtattttttgcttcctctaaattgaagcatacattccgcgaacacctccattacttagcagcacagtgcagaatatcacctccccgcctcttatctaagtttttcacagatgaaggtgctctaaacttattatattttacttggctaatgttgtgttcctttggaattgatatttacaaattgttttggtattctatagttaacatttttcgttcagaatcagaagtcagataaagttcaattggcatattttttggttgaatctttcattctacaggtgttact

SEQ ID NO: 4144 - DNA, 1166 bp, Glycine max
tctgaaacaaagaaagctgtgccaattgacatagatctgaccatgagtcatgctagcgtatcagggaaattcaatactcatgcaacaaatggcaaagagattgaagtaattgatttagaaaatgatgattccattcaagaagagaagtcaatcgacaatatggatagaaagtacgtttttcctgcttccttcccccctggatattttatgttatcttttttaagcgttcttttatccaatctctcaaatttagtgtttgttaggatctaatttatctattttttttatccttgctttcagttacttagtgaaaatatcagctggagcatatagttttaaacacccttcatttacttgccactctcttcctaatatgttgtcttgaaatcacaggacagagactatgtttcctggccttgaaggtttttctagccatgctcaaaatgctgctgacatgcatgatgttcaggatggatatgggcttatgatatcagagttgcttgggccagatttccctaactgttcttcagtacctggtgacataaactctgtgcacaatgaaatgggccttcaaagtggaacggtacaatgctaccttcaaattgagatatattttgatgcatgtccttttaatataacctttgctgacttgattgttgctgcatgcctttataatcaacaatgaaatgattctttattctgagaagatttttcttaataatcataattgatgattttctcataatttcattcttttcgtttcaggggacacttgctgaggatgattccatatatatgtcgcttggagaattaagtatgacagatttttattaatggtttgttttcttatttgtttttttttttttttgcacagcaaaaatcgatatagaattttatatataatgaagtactaggtgtactgcatacaggataaagagtacaaggcaaaattgcctaacccatctgaaaattacaagataacattagctgaagccaaaaagaatcaacccctaagacaactcctccctcaaactagtggaccattgattaaaatgaatatggaaatctttgtccatacattttaaccaggcccatgaatggaataaagcttcatccatgacttatttgttaagtgtacctgtgattcatgttagttgatatttgat

SEQ ID NO: 4145 - DNA, 1180 bp, Glycine max
tgccgcctgcataacaatgagacaaagtttagttgttactgacggaagtcgcgcttcttacgccaagaaacccgatgaaattgcagcggtaaccttagaatccttcagttattcatgtatgcgtaaatttcaatatattaatcttcagtcaacttcatcctatggaggttcttctctataccctgtctaacattcgtttttgtgtgcttggtgcttactagcaagtttgtttagagaaggctttccatggggtctaaaaggctttccaactctcccattactgcgagagaccaactagttcacagtatctgcgatgctaaggtcaggagcccccaacacctctagatagaggttggactaacatatagaattcaatttatttaaaaaaaaatgttacacaacatatactttttatcctatattctgcgcattataggcagttcctatgttgctagagacagcttagctccacctataggccattctttcgacggcataaggaaaggaaaaaaggcaacaagagccgtctcctgtgaatggtgggcatgtgtaatatcaatttgaaatacttcagtggatgagttttagagaactaccaaattccaaagcaaatcagccatgaatttggatcagattctgtaatcaactggtagctatgttgggtccccactaaatccaaactttagccaactttacagtgctctcatccaattcaaacagctttcatctagcctcgtgctgcatagaatgatgcaagtcataagagctattaaataacaaaatataatattttaatccagataaagagagggaagccaaggtggatatgaaattcagaagtacatctacccaacaaatatggtgttttggatttctccttttaacacctacttaaaagttaaaactgaaacaaataaaactatggttaataaagcatatcatcattaacatgccgatggctgtgtgtacttgtgaacctagcaaatggcgtcaaatccaattaccaataactcttagtaagcatgagcatgaagaggcaactgagtgcggagcatcatgcgtcctaagcatttgtaactaatgttagagaaataacatgaaataaatatatatacctcacatgcctcaaaaactggccgaacatgctcaaatatttcatctactgttcccactgcattat

SEQ ID NO: 4146 - DNA, 1198 bp, Glycine max
ctttgcatgcctgcagacatatatattcacccctaaatttgatattagttagtgaatttgtgtaatgtggatatatatagaaaaagattccatgtgttgtacgtacccctctctctgatatgtctgaaactaatatgcatgctataattaatgctgttaatatatttgtaatatacctaagctaaacatagccatcccaaggcccgcatctgagatgattttgaccgatgctttgataagactaggcatttccatattccatctgcaagttcacatcataaaatgtatgaaataatacataccgcaaattatagattgttattgtaattataaaaatcataaaattgttattcaccatcataaaatgtatgaaatatacatattacatccatatgactttttaaattattattgtaaaaaaacttaattattattttattccttcaatttatgattcttaaaatttaaaattattttttagtttctggcataataaaattaatactttgtgaaattttttagatgtcataaatttattttatattttagacatttgaattttcattttaaattaaaactaccacaaagtgctaaaaaaattcactacaaagtaataaaaaccgttaaaaagtatcaacttgttatatataagaaataaaaaaaatcaatttgttaaaatttggagactaaaaaagtatttttaaattttaagaattaaaaaaaacatatatccaaatttaaagattaaaatagtaattaagtcttgtaaaaattaatcaatttttttatatataataatttataattgaataagaaggtaaaactattttagtgtatgatatattttctcctaattatatatatatatatatatatatatatatatatatatatatatatatatatatatatatatatatatatgcagaacattttcttttaatatgaatttagggtgagagaaataatttagtttaaggtgaaggatgttggtctagctagatttggtattacttttttggtaatgagattcaatatatcacttacttgaaagagattagagaccaaagaagtcctaatacactagaatatgtattagggtttcgagaaagttttcttcctactacgacgagaataagcctaatcataacaaaggcatgtggcattttctggttattggcaactgtgtctttgggtt

SEQ ID NO: 4147 - DNA, 1047 bp, Glycine max
aatcacggcatgcttggtatcacaccacttagctggttttccccgagttggcgttctattagaagtttcaagttttcgatggatgttggtatggaaccattcagattgttgccttgcaagttcaacaaagaaagactgctcaaacttgaaatctcagatggaattgatccacccagagaattgcagctcaaattcagtattgacaacttatgaagttggccaatttcaataggaattgcaccattatgcttgttcatttgaagcttcaagacttgaagattggcaagattacctagcaatggtggcaatacaccagtcaagtgattccaatttcctgcaagattccaattcaaccagtatggttccggtcaagtcattgttatccagctccaagtatgtcaaatttggaactgctgcaaaagcacctgaaggaatgtttctactcagttgattgctcccaaacctcaacttgaacaagtttggagcaactgtgatgaggataagaggtcttctggaatgggtccagacaatttattaaaactaagatccaaactcgtaacatgatttgtaatcccagggggtacaggacctatgaaattgttctgatttgccgcaaatcttgaaagctttgtgaagttcaaaagggaagctgaaatttcaccaatgaggttattagaggaaagaaccaaactttctaagttagaaagctttcaaaaattatgctgaccctatgctttcatattttctagactcaaagcatcacccaaatatagaaaagtctcttttgaagatttattccaaatatgaagagtttgacttcatatagcatttagcagcatatgtagcacgctcttcattgttggtcttgcttctggggatgtactaacacaaacaagagcaatctcaagaatcgcaagcatgtggtttctaatggcttgtgatgttttactgacattaaaatcaagaatgtaatcttggcctgttggattacgtaaaacccactttaggaactccattccctcagtcactgcaggcatgcaagctggc

SEQ ID NO: 4148 - DNA, 1087 bp, Glycine max
aagtttaatgatcccctcttcttgaaagatacctttttcaacaagcttaaatgccttaatggcagctccttcctccaatatggattttgaaaaaggcggcatgcttccaggggtagtacccccgatctctgcatgatgccctctatttgccacaaaaaaaaccaacttcccattgaagaaaacaggtgtaataacagttatatcaggaagatggctacctccagcagatggatgattagtaaccaaaacatctccttcatttaaattgtcaccccagtaattgagctgccactgaactgtactagacatagctcctagatggacaggaacatgaggtgcatttgcaactaggcccccactaggatcaaatagagcacaggaaaaatcaagccgttctttgatatttgttgaaatggaagttctttgtagtgtccttcccatctgctcagctatacccataaatctgtgattgaagatggagagctgtacaacatctgcaactttatctgatattttaacactggttaaaggggactctatttcaatcttgatgtttccgtatttggttataatggctctacagttgggttctacaatcacagtgctattgccattcatgatgattgctggcccagacatcatatgaccatagcccagcttttcaagcttatagagaggtgtttcctgccaaccattcccaaagtaaaccttatagtagccttcaactataggactgccaggggcaggttctatggcctgtggcctcaatatattggtgactcctataccacgaactctaacatcacagataacaatattcctattctggagtttaaagccgtattcctgttgaaacaatctcacaaactcagtagcatagtcacataaatttccatcttcagctacttgtcttttgaccatgatggcagtgtctgtaccttcatatctcaagtttaaatatgtctctgttgaaatattttcctccttaaatccttgaatttgcaatttctgctttacctgtctaagtaaaacagcttctcgttgtgagacctcaacaatagattcaactccatacactgcaggtcga

SEQ ID NO: 4149 - DNA, 1223 bp, Glycine max
ccaaacatgcatgcctgcagcactatcctttcctcctgcatttttattattaaacaaaaacattaggaaattggggaagatactaaaaatatctccaggactgagttggagttggggttgtttttcttgttttgtgcacttctcagatgaatccctagttttgttacaaggtgactttctcttttccatgacccctaacacaaaaataaataaataaattgaattttccctttcactcatttgatcttggatttaggtctcccagattattcagcatttatttgcaagatcaaaactttggcaaacaatatgaaaattgtgttcccctttgcttttagatctggaattgcagtgattgctacggttacaatgtgttttctatttatgtgaaattgtgggagcctggggagtatgtgtaaagaatttgggaaccttgcttatgttatacttatgtgatttgatgcaacttgtgaatatatctgtcttaccccttaaataggatgaaaatattatgcttgaagttaaaagagtattattgtctttggtataacttttgtttctcctcataaagctcttcaatttgcttcagggatccgtatccgatacccacacccttggatactttaccaataatatccaaacccatgataaaatttatgaaaatccaaatataggaacatggaaacattgtccattgataaaccaaaaatagaaagtgtcctctttatgggtgatttcaagaaaggaataagactgatagtactatttgtaaataataaaaagtaatctatgataataatgattcagatttttttatttatttttaataatgtccaagaaagttcttaatttttttttacatgtcgaatcctatatatttttagaataattggatcgtcgtatatcggacacatatcatatatttgtgcacatttgcacactctagttgtgttgtatgttttgcaattaatgcctgcaaaatggaatgggcatatttttgtaaattgtgctttgtaaagaaagtgaccacatttcacatcatgcttaagtcacacctgttcatgttctgtaggggggttatactgaaaaaaataaggacatatatgcaggttgaaagggaaggagattgtttttcaatagctagaaactttatacatttttgtaggcagatatttcattcttcaacatgttctaaacgcttgtcagcttgcacatatttcagt

SEQ ID NO: 4150 - DNA, 990 bp, Glycine max
cagggatcataccaaatcctcttcaaaatcacacattcaattttcatgatgttaaaaacattctctaagaaaatagaagtttagccctctttcatcttccactgctgattctaattctgatcctgactatataaattgccttattcttttaaagttgctaactataaggaaactcaggaatctcttaagcatgcattagattacattttttagattgtacattcatcaatggaattcaatataaaagtcaatatgtttagtttcagttacgttcaaggaagatcatagcaatctttctcttcagagtcacaagaatgaaagactccaacgttgagaattatgatataaaattctccaacatgtatgaaaccaagtgaatctagatcatcataaacacacaaatactcacttttaaataccacaaccattcctcttcaccgtaactattaccaacccccccctacggattgtagcaatacaaatcgaattctcaaagggcaaaattgttttaaaaggtaacctcataataagatactaatattagaaaaatacaacatctagttaggttatattctattaactcgtttagtcattgagctttccaaactcagtcaagcaaattgaattccatcgggtaagtaccaccatgtgattcacaaactcacaaattaaaaggaacgaattttagacagcagcacaaaacccaaaatgcataattccacatcagataaaaaattcaacaagatcaaatcataaaactattgtactaacaaagaactaaggtaacctattcaatttcaaagcaagacaacataaccacataggtaaaaaaaaaagagtaaattaagataagaaaaagatgatagatacctgggacggttattggcaacaagagaatcagcagcagctctcttggtgccagcagtgatgttgttgggagaggaagaagaagaggaaggtgatgctgctgctgctgctgctgctgctgct

SEQ ID NO: 4151 - DNA, 1059 bp, Glycine max
ttatattagattttttaattatgaattaataaataataagtttggagaatcaccgaactctgagcttccaaattactaaaggcaacatcaaaaaactcgaaactaattaaagttaaagcagagaagagcagagaatcatctctctctctctgcaagaacaagaagagaagagacgacagggaggagaaagttgaacacttttctcctttattactattgctggaacaatctccttctctctctctctctctcttctttgaaggcaagaagaagaaaagaaaagcgctctcttcttcatcttgttgctttgtgagaagagaagagagatgtttgggtgcaatagtttatgctgggattcttctgtccctgaattcactgaccctgatcctcttcccttctctctgccttcgccccttcctcaatggccacaaggtatcttcttagcattgactttttaaacaaccttctggatttgattgatgggcttttctttttcttctctctctctctctctctcttcttaatagaattgcaacgattaggcactgttttttcattcaatcaaacgagaaaccaaactactttatatattatatcatttttgagaaaaactgttttcggtctattaatttcaagctacagaggtaattggatcagaattgagatgggttgctacttgctatttatacgtcattttcttttatcaatctcgcggtatattttgaaaacaattagttgtttgcgaatattccatcactatgagcacagagaagatagatgccttgtttatttattataattttttttggatgtgaagtagtggcattaattccatggttctctcgtttaccgtgttccatcacgtattgcttcacttcaatagaccgttaaaagaaaatgtttttatagtaggaaaagggtttatgatgttaccttttttgtaactctccaactggaatttcttatcttgacttaacactataaatgttttgtcaaatgttgtgcagcttattgatggatgtttgtttgccttagagaattgaacaatattaattcatt

SEQ ID NO: 4152 - DNA, 1019 bp, Glycine max
gccagcttgatgcctgagttgtttaaagcatctttctattaagatgttcatcaagaacaggctgaaatgctgttagtattttctctggcaaacacccaacagccagtttctgcaatgaagatgaccaagtattgacacatctaaaaatcagacacatcaaaacatcaaataggcaacagatcaaacatcagacagtgaccacaacttgcttactattctcactgagtgggcatccctcttcactgtcttgatagaatttgaactctttccattgcttgcagatggaaggggattcttgcccattacgtcatccttaagaccttgacctcgtgaaccaaaaaccttcctctcttcccatatgtcaacctattcaaaattcaacccaacacacaccaaccccaaaaaagattcaacccaaaaggaaagaaaaagaatgaaagatcaggttagaaaaatactaattgataaggcaaatgacacaagattgaaaaaaaaaaaacctcagagaataatggtttttttttttttatcagcaaaactaaatattatatatatatatatatatatatatatatatatatatatatatatatatatatatatcaatgatcaaaagtaccagaggtactagtacatagggatatacatcctgatatctagacaccgagactaaggtattctagatatattagtaacttagctgaccaaaatggatctctacaaaaggaaccgcgcagtttagcctcatctcactcaccacaaaagtggattttctaatacatcatttttctctggagtagcatataaagattgcatatattacactaaaattgattcaaagattaagaatacacacacaaaaacccctgacatgactgaacaagacactttcattactatgtatgacaatgtaggaagcactgatacaatacatgaatcgctagataaattgatgtcaacggaaatggaaacattgtgattgcaggagaaatctataccaataacaacaatgaataaaa

SEQ ID NO: 4153 - DNA, 1258 bp, Glycine max
ctgttgacagtagccttatcatttagactccaaataaatacacttcaaacatccatggttgacactatgttgaacaagagcattagttatcagtaaccgtgcaaatttggaattacctgaagatagtttcttagaatagtttgagcatctagagatagaatatcatgaagacttgtgaagactcgaacagcaggatccaaagctggtgcagcagcatcaaatgctggaccaaaatgatctgttaaacctgttggtgagttttcatctagcgatttgtaattctcgaaaactgtcgctagaagactttcaatttgagtttcacagtctgaaagtatacttctctgtcaggacaaacaaacagagaaaactgttacaccaccatccatttccaaaatcatgaattacaaagtttggttagatagagacagcattagatatgaaggaataacagatttgtaattctcaaaaaagactttcaatttgagtttcacagtctgaaagtatacttctctgtgagaacaagcaaacagaaaaaactgttacaccaacatccatttccataagcatgaattacaaagtttggttagatagagacagcattagatatgaagaaataacagatttctcaaggtacttagacaacagaaatacaagcaattgctcatactcggagaacttttactctagatatgtatgacaagtattaaggtggtctgaactctaaactaatgtcattgacatagcatattaaaataatgagaagctggaacaacataagattaagcaatccaaagtacaagatatggtaagttactgcaatggaaagagagcaatatatgacttacctcctgcctggtcagactcctctcacttctggcctttatgaggggttctagcaactctctcccaagctctaggcagtccttggttggagttgccacattcatcacatgtaatagatatctacaagaaaaccaccacaggtaaatgaagaaaaatgaagaaattaaaaaaaaatcatgtaacataaagaatatcagaaaactgtttcttttttccatatttttgggggcacccaaatgacattcaaatacctcagcttggcatatgaattagaaactccatagtagtccgcaaatgcatctaacaaccatttccaaggcccatttaaccgcaagtttcgggagtggaaatgttgtgcacgcatggcaccctccaataataaatcataagcttgagtttccacaacagccgcact

SEQ ID NO: 4154 - DNA, 1137 bp, Glycine max
tctaactttctttgaattctcagcttaatattctactttattacttttctccttgatatagtgcctttgaaaatcacagataccactccaccaaggatccaaggatcagtgtcctgtgcattctgtgtttaatcttatttcactacacttcaaaagtatattcatgaaatgagttgaaatatttacgtctcacgagtatgaccttaagtaatacgtatctatgttttcataccaatgtgaatgtttcaaagcttagctaaaaggctaaacacatcctatcctatactgagaaccgtagttgtgtaagaaaggcccaatactcggcccatataacttctcactctagactctaatgaactgttttgttcaaaagcgggaaggagaaaagagagattttaatggagggaaggagaaaaggaaggggaagaattttaattacacattatgtttgattgataagagagttgagagattataattgaggagaggaaaggaaatcgttttctcgttttgtttacaagaaaagaaaacggggttttaaatataattttttgaaaacaaataaaaatattttaataatttcaactgaaatattttaaatttcttttccttcccctcaaatccttccaatatttgaggggaacaaaatttaaataagagattttgctcctatattttcctcccctcctaaaatttgaataaacaagtgcagtttaataaaatttctcttcttccctccttgtctatttccctttaccaaacattatgtaaagcatccttgctcattatatgtaggtatgagtgccgaatatagtaacgataacccattgaaattggttcatcaataagacaaaaacgctttgcataacggatacatatcatatcatgttaaatatattttgttacatattaccggttcatactcttaatatgagatggaaaaacaagaccaccaaaatctagcagaacattgttttgcttgtgcatgtaacatcactagaatggatacgcagagttagcatactctaacaaaaaactgtacttatccaacaagttatcaaccattgatgattgacttattgtgatcacctatggtttcataaacggcaccttcatcaataagatttttaatagcca

SEQ ID NO: 4155 - DNA, 1189 bp, Glycine max
aaccaggtctgatataatcttggatgtcctattgaagtgccaccgagtgcaactggaaattttggttgctttaaaaactggtttgactcacttttcttcacctggagagcagcatttcatcttctgagttggctcaaatttttctgaacttaaggtgtaagaatctttcatgtcgaagtcagttgcctgtggacgaatgtgattgcaaggtttgtgcaaagaagaatggtttttgcagggagtgtatgtgccttgtgtgttcaaagtttgataatgcctcaaatacatgtagttgggttggatgtgatgtttgccttcactggtgccatactgactgtggattacgggaatcttatattagaaatgggcatgggacaaaagggatgaccgagatgcagtttcactgtattgcttgtgatcatccttctgagatgtttggctttgtcaaggaggtgtttcaaaattttgcaaaagaatggtcagttgaaacactttgcaaagagcttgaatatgtaaaaagaattttttctgccagcaaggatatgagagggagacggttgcatgagattgcagagcaaatgctgccaaggttggcaaataagtctaatctccctgaggttttgaggcacatcatgtcttttctttcgggtaagtaaaaaatttcttccatgattacatacttatactatactgttgttttaatatttttagcctctaattttacagtatctaaaatgcttgcattaagctctcatttttatacatggaaaattaagtgggatttgatgactgatgagtgaactgttttttgctaacttgcagttaactactagtatttagtacatctgacgttgattatatgtgaatcaagatactcagactctcggagtctttggtccatattggttgtgttaaattttttctaaccatggcctaaggacttctcacctgtactccaatttccacaataattaaaccatttacataaatcatgtgaagcataccttttctttgcgtaatattagatgggattattattattattgttactgaaagtttttctttctatctgaatgacaaagtgaaaatattatggttgtcagatttggtaaacttctgaactaaagaaacatagtttattaaagtggctttatgttaaatcgaaaaatctgagtgagtcatttatttt

SEQ ID NO: 4156 - DNA, 1277 bp, Glycine max
  misc_feature (1253)..(1253): n is a, c, g, or t
  misc_feature (1266)..(1266): n is a, c, g, or t
attaaaaagctctaatatatagttaaatcaatcaaagcacacacagaaggcagaaaacatgaaaattctataaaaaagaatgaaaattcaatgctgcttgggcttcttgacaggtaggtaaatcaatcaaagcacacagaaggcaaaaaacatgaaaaattatacaaacaagtaaactacaaataaaaattcaaggctgtttgtgcttcgttacttgcaaacccttgtctctgattaattatgcaacataaactcataaataaaaaaaataaaaaaaaagggagacaccccaggatccacactccaaagttcccttctttttacactttttaaagccacagacgaaacagtttgagatgttcaacacaaaacgaaaagagaaaaagaaaaaagcgattcacaatttcaaacctttcaacgccacaaccatagagtcaaataatagaagactagaccagaccttcaccatcatgaaaattaaaaaaaaaaaatcaaccaaaaaaaaaacaaaaaagagagaaacataaaaacacaaaacacagaacacaagatccttttttttcccactttcgcacgttgttttcttttctcggtaaccaaacacggcatcgaattccgaaaatcaaaaagcaaaaaaaaaaagagcgaggaatcaggcgcacgtacacagacacagaaacaacaggaactttttagagagagaaaaggaggagagagagaatctcaccggcgcgtcggtgggttggactctggattcggcggcgacgatggcgttggcggcggcgaaaaccgtctcggcggtggcgcggttgtagttgttgcggcttgccatgccgggattcggatgcgcgaaagggatcattttccggttaccggagatcgggaatggacggcggcggaacggtttctcggcagcaagaagcaatcatggatttggaaaacggagaattaaaaaccaaagaaaacaaacgaaaagcaaaaaaaaaaaaaaatttgagagaatgaaaagaaaagtatgttgttacgaaatgattaaatactccacagaacagagaagagaagtgaagtgaagatggaatttacaatgaagagagtattattaaattattgttgttaattattatatggtgttcatatcatagttatgctatggtagaaagaagaatagaaacagagtgaatgattattttattcattcattctttttctctgttttctctttctctctcttcttatgttgttatgtttgtgtnttggttcactttnccctgcaggca

SEQ ID NO: 4157 - DNA, 1267 bp, Glycine max
aaacctcatttaaaatgtgagaagtccagataaaaatcttttatacaagactaaaaccagtaattttctctatttttatttttaatgaagtaaagccttattataaaaataaaaataaaaactaatcatagacattaataataagtaataagcaccttgtgggtatccctagattcctagaggagtttaacctccttctcaagctcagggattacaagcattgttctccaacttgtccattgagcgcatagcatcacatcaaatttaagttacttaaagcaacatatagaaatatacgggaatttcaaaaggagtagttaacaattggttcctacacaaacaagtattctattaactcgttaaagattacatcaatgtctattttctcaattacatttccagttattatttcccctcctacaatcataaccacattttatcaccaaaatttacgagtagattgaatacaaatgcaaaatccatttatcagaatagttaaaaggattaatgatataccaagaacctttttcctacttagtgtatctccataaatgtgatccccaacatagagaacctacatataaagcatcaaattttacaggaagcttcagtttagtgagaatcctcagtgtagttgaatcctaaatcaacatcaacttaaaatcttaaggtatttaccacttgctcttgtagagaatatcattatgaactacgaaatgaacaaatatgaaaattcttttatctgtacctgtgatccttctgctacaagatttcatgggtgaaagttgtttgtagcatcttcaatttcatctaatgagaaaatgcagtatggtggccatgggactccaagaacaggttgccacattggcagaggatcatgtcctattcccacagtaaaaaaaaaacaattaatgcatgagttaaataactgatttaaaaggaatttgcagcactagtgcttgcaagaaggttttgtaggaaccttagcagaagcatgaaattctgccaactgcaacatctgagaagtcatatagtagtgtattagttgcatgtgttatgtcttagaacagagtacccccgactctttatctacttttcttgctctgttgttgggatagaattaccacgttgacatggcacaaggtttctctcttcctattgcatctatatatgatcgactcattcttcctatcatccgtgttttgctaactgtaccactggtgattctacttgtgagccggttacacaccaactcatacttgctcat

SEQ ID NO: 4158 - DNA, 1109 bp, Glycine max
tcattaaagttaatttattgagggaggaacaccaattattttgttatttaaggattcttgattggagagacctattttcatagtttttagttatttgattaattattatcttgttacaaattcagctgctagtgtttccattttttttaattgtgaagcttgctgtacacccatatttttttcactttttttgtttccttttcaaatggttattgcttgcagagaaagacttcaaaactactgcttttgaaagttctcaatcacatagtgggtcctattatggtgccgataattccaattataatagtaattattatcaggtagttatttaactttgttctttaccattttcttttttggtgcaaaacatgtcgctttacaattttaaattattccaaataatctttgttgtttaggagccagtaaccactcaagtgcagcatggtgtttctggaattcaatatcctgacagctatcaacagccatttgatcctagatatggaagaggctatggtgctcctactccaccccagcaacctcaacagcctaatttgtttgttccaccacagactactcaggttgtgcaaactccccaggtatgtcatcatatcattttacatcttataaaaataataggctgcttgattttttataccttttcccttattgctttcttaaatctaattatttatttcttgtagccgactttctcaaatactgctgttgcaccaccacctttgagaacttttgatcctcaaactcctcccatgcttagaaatgtggagcaatatcagcagcctacattgggatctcaattgtataatgtcagtaaacctttttaatttcaagtggtatcatcaattatttgaggctacttgtggattaaaccatgactttctatatttcagacaaccaatccaccttaccagcctacaccccctgttccatcacaagtggccttgagtcatggccagaacttgtcacaagttgtggcacctaccccaaatccaatgggatacatgccagtctctggttctggtggtgtccaaagacctggggtgggatcaatacaacctcccagtccccctcaagtgcaacctgtgcaacca

SEQ ID NO: 4159 - DNA, 1014 bp, Glycine max
cactgaatcttagtagcaaccaccttagtggtaatattcccagcagttttggtactttggggagcctggaagtcttggatctctcaaataacaaattatctggtccaattcccaaggaactaactggaatgtcaagtttgacacagttgttacttgccaacaatgcactgctgtctggtgaaattccaaaattcagtcaacatgttgaagttgtatattctgggactggtctgataaataatacttcacctgacaacccaatagccaacaggcccaacactgtctctaagaagggaatatctgtcgctgtggcagttctcattgcaatcgtagcggctattgttcttgttggccttgtcaccctgctcgttgtgtcagtgtcacgacattattacagggttaatgacgagcatttaccgtcaagagaagatcatcagcatcctcaggtcatcgaaagcaaattattaactcctaatggaatacacagatcaagcattgacttctccaaagccatggaagttgttgctgaagcatcaaatattactctaaaaacaaggttttcaacttattataaggccatcatgccatctggatcaatgtattttgtcaagaaactgaattggtctgacaagatattgtcagtgggaagtcatgataaatttgtgaaagagctagaagtcttggcaaaattgaacaattcaaatgtcatgactcctttgggctatgttctgtccaccgatactgcttatatactatatgaattcatgtcaaatggttccctctttgatgttcttcatggaagcatggaaaactctttagattgggctagcagatacagtatagcggttggggtggctcaaggactttcttttcttcacggattcacctctagtccaatactactccttgacctgtcaagtaaaagtattatgctgaagtcccttaaggagcctctagttggggacatcgaacactacaaggtgattgatccctcaaagagtacaggaaattttt

SEQ ID NO: 4160 - DNA, 1222 bp, Glycine max
aggtgcagctgcccttttgtactcacattgaatcggaaattgcagactcacgatgcaatcgacgaagatggtgaagaaaatgggagtgatacgcccactgatacgccattaggtattggccgtgtttctcatcggttaatccaagcccctgcaacatggttggagacaatttcaacattgtcagagactctcaggttcacgtattcggagacacttgggaaatggccaattggggatttggcgtttggcatcagctttcttctaaagcggcaggtaatgacaacgagtagattttggttctttattgttgccctgatttgaagcaactgaaaatgccggaaagctgtgtcgtttttttatctatctgtaactttggacacatttaagtagtaagtagaatatagaatcagtatttagtgtggaagccaggtgcatatttttcaggtagaactataattgatctgaaatggtagttgcaacctgcacttaatgtgcaactcacataattcacctaaaggattgcccgtcactgacattgatgaatgaaagagagagaaatatagagaaagtaaaatggacaatggtcatggaagttatgcgagttaggtgaactttttcatgtgtaaataaaattgttgatgattaaatggttggaagaccaatttaatgctttccatctcaataaaaaaaattatggtcgttaaagaaataatcccacatttggagagcagttataatttatattaactcttaagtgttccttacatgtgataggatctttttttcatgggtgttgtttttgttttgctttttaagccttctcaacatcacagcagtggtttgggatcatgacttgcaatatttgaacttcttttgttacttgttaatcatgatcactttgaagttgacatattagattattcttggattttatgatttacatgatatgatttctgtttatactttctaggagagtaatatggctaaggtagcttagaaatcagactattctctacaaaatgaatcctcacaagattgttcacatgacctgtgctactttatatatttgattttgatttaaatcatatattaagcattttttaaggtagatcagtttcatgacatcctggactacttaatttcttcatctcagctcaacataaatagatgagaagttgctctgtaatattggttttgtgccagtttaatttgttcatattaa

SEQ ID NO: 4161 - DNA, 1185 bp, Glycine max
accttagaatgcagttttcgcaagaactttcagtccattacggagttgaataaaattgaggaattgaagtgaatgttttcatgtataaatttacagtagcatatggtatattgtaacaactttatattaatattataataataatgtagttaaccttttaatttttcttctttcacataatggaaaatagatgactagattctaattgactagtctaacattatataatttgagcaggtaagaactttagaatgaaaattgataaatcacctcatacatccttttggttacaataaaagtaaattgcaacttcacatatatttcggtaattcctaattcctataataaaacaaataagctgaaagctatctttcacaatttgccacgtaacaagtagtcaaaactccaagttattcatttcactttctccaaattacatcttcctgttttcgacctttgcaaataaacatataccctaagataactgatgttcattacccataaaaaaaaaagaaattgacaaaaagtaaatgtagatatacaatgtctacatatttggaacccaatggtgttttcccctcgtatatctcaattttcaatattttttggtaaccatgaataaccttatccccattcaccacagagaattaccaatgcttttattgtcctccaattgtaactttgtatttgaaaattcaagagttggaaaagttcactcggacattttaaccccactcgttttaacaacagttcatactacagaaatcttcaataaaatgagcatttgattcatcagaagccaagaagggaaatgagtgattgacagttcatctggcatgctccctcgccagtggcttgaggatgtttgagactcccaaatcacatgggctctactctaatgtacctcaggaattcattggagtataatgagccacaaaagactgagaaatgataacttctcttttttatgggggggaacttattttctcataaacagcacataatctttgtcactcggctggatttacagaaagagcttactcgatgccttctgctttttgacttgtctctccttcatcatgtccctcaattcatttacactgctccatattcctttctcaccttggatctttgaaagaattgagtaggaaacaggatgatcgctctccagtttgcggatcctct

SEQ ID NO: 4162 - DNA, 1008 bp, Glycine max
tcgccagcttgctgcctgcaggccaaaatcattgttaagttaatgtaaaggacaaattcattggtctaacagtaaagattacatctagaaaattctttcttcatctctatcacatcaaagaaaagagaaatcttaattccttgaacaaaaaatatggagtactcggaaccttttaattcttaaccatctctaaaggagctgaaaccatgaataatttattcactcctcaatgtggagaggacaagcacacattaatctagaagtcactgcttgaaagaggttcatggccatcatctccaatgaagatattatcatagataattgcagcaattgctgcacctatgaatggaccaacccaatagacccagtgatgggtccatgaccatgtaaccacagcagggccaaaggacacagctgggttcattgatgcaccatcaaatgcaccaccaactaagatgttggcacccacaataaaaccaattgcaattggtgcaacaactcccgcattccctttctttgggtccactgctgtggcataaactgtgtataccaacccaaaagtcatcactatttcaaaaaccaatgcattccacacagacacaccaggggatagagaaaaacctgatgtttcctgcaatgtacaaattacaaaattaattagagtctcaatcatgaatcgagtgcaaaaggttactatcaatttatgagaattgagtagcatagcagtgttaaaggcttaagcagaagattaaatatggagatataaggttggttagtgatgaagggagaagggaaggggggagaggtcgcgggttcaaatcccccgctaacaaaaactaacaatactaattgttaatatttgccgataaaaaaaaaaatatatggttaccattccaccagttgcatgctttagaagaatgcatgcaacaactgaaccaaacaactgtgcaatccaatacaaaatacttctcaacaaggttatgtttcctcctataaggcaccaaatgt

SEQ ID NO: 4163 - DNA, 1219 bp, Glycine max
aaaacatacaacaaatttccacaggcaaaactcctgcaaaataacaaatcccataaacaagctagcatgattgttcgtcagatcttcagtagacacaagaacatatcatgtattccaagtgaacaacagcgcaaggctgttaaactacaagcaagttttcttcttgttctccttgctattggcaacattcatattcacactttccttatacatcttcaacaactgagacgaatgcttctcataacgtttcacaaacgtgtccaggaatcttttctcagacataataaacagcgtgaccatgttgccactcctttccaatagaccttgcgctgcaagaaaccgaacgacggaagccctgggagcaatccacttcttaaggctcaaccgaaaaataacaggatacttggcaagctccaaagaactcccacctaactccttaacccaataactgaacacagcatctatctcatcaggttccgtcagcatacaagaaggatgcttcttaaacgccataagaacgtgttcctgggaccaaccccacttcttgaaaaccctaaccgactcaccccagttggttttattcactgtgcttttcgcgaccaatgcagcactgaaattgggggcggaggtatcaaaccctaattgcttgagtgcatgcaccgtgtcgggtaagtcacgtgagcagagaacagagggacacatgtgcagcagcctggcaacggcggaacgcgtgaagccgttatcgaggaggaattcggcggtaagagggaagcgggggtcgtcggagaaaaagacggaggagtcgcggctgagacatcggatgatgagttcgtcggagacgaggaaggttcggaggaattggtaggcggggacgatgtggctgtcgagggagcgggagaggaaggtgggggaagcggtggcgatgcggatgatgtgggaggtggaggcgcctttggagcggaggaactggaatttggggaggatgaggttgttggggtcgcagaggaggatggtgtgttggccttggatgacttggcggatttggaaaggagagaagccgtgggtggccaagaaggcgagaacggagtcgggcctgtgggggctgtcgaggcggaacttgcgggagatgctgagggcagtctctggggagaagccgaagcgggtgatgaggtaggagactgtgaaggagtccgaaatggtgctgcaggtcgactctaga

SEQ ID NO: 4164 - DNA, 1316 bp, Glycine max
tgcctgcaggttcaagcttggttcttattatatgtatcttggcattcagaaccagctgctaatccactcccattatgtatctacagtacctctggtactcatttatatatatactacttacttttgctgagcaaaaaaattaaataaataaataaataaaaatttagaaaatattacgaagccactgagatcccttacaagagcagtatttatactgctgagattcagttgtaactgaaacctaactagagctaactgtcaagtgactacagttattaaactaaccagagttagttactcatgtacacttacattgtcatagtttgatcttggaagagctttaataaaggcgtcttctgtttggtggtattaatgaacatgacaggccatatagagcctgttatgttctttattcagcatggcccccatacatcattttggattagtgatattacagtatacttactcggtgtcttttcttttgctttttagataggggatagctgtcacactgagagttagttaggttttctgttttgtattgcacagctataaatagctatcttctcctttgttgtaaaccaacaattctcagaatttcaataatacaaattacagttctgttcataaattctaatatggtatccagagcacagtttgattcttaacttagatctatggcttctgatcaaaatcctcctccacctctgacacttccgttcaatgtggaacctatttctacctttccactgctgtcatttggtggctgctgttactttctctcactctatttcagagaaattatatacgaaaaactatctcttcgggtatcaacatcctgtgataaaatgtcaccactgattgcatcattttcttgtcaatcctcaaattcctcactgttgaagatcatgacactggcagagtctctgcttcttatcttgcttgggagcagcaagaccaacttctcttatcatggcttcaatcttctatttcatgcgaaatgcttggctgtgttattggttgcaaatctttgtggcaactttgggagaagattcacattttcatttgcacactaatgtgatcgcactgagctacacagcactacacttgagaatagcaacatatctgaattcttgcttcgtattcgggccttagttgatactctcatggtgattggggactttgtttattctaaagaacaaattaatattattctggaaggggtgccggagcgaatataatagcaagttctactctcttatcagtagcgaatatgaaaaaattgatctacttctaatgcctcaccacaacttcct

SEQ ID NO: 4165 - DNA, 1261 bp, Glycine max
atgtgttttttatgaaatccttatatctgtctaatttcaatggataaacgaagttaatgattttcaggttccttggcatgttccttgtggtggagtttgctatggagatggaaatttggccttcatcgcaaatgattggcatactgctttgctgccagtgtatctgaaagcatattatcgtgaccatggtttaatgaagtacacaagatctgttcttgtgattcataacatagcacaccaggttcattctctatctagatatatagtcagttcatttttgtgaaaagaaagaatatattaatagacatatctattgagtgtgagaggtgttaagcttgaccatacaaccatgtacggattgtctagattattttacctaaatttattcttaaccatccattttaattaaaaggtcaagatttactcctctcatgttctcatctctcatttgactatatatatgttgaaactctagagaagagaaaagggatttgtatattgactttagaaaatattactacaaaagccactgagatctcttacaagagcagtatttatactgatgagattcagtaagactaactagagctaactgtcaacggactacagttataaattaaccagagttagttactcatatacacttaccccccctccccctgcaaactcaatgaggctgagaaaccaaaggtagctcattgagtttggaacactaaggagacaaaggcttagtaagaagatctgcctactggtctgtcccagggatatgctgaaccactagctgcttggcgagaaccttttctcttacaaaaaaatatctaactctgtttggttctagcatgtaaaactgggttatgagctagctgcactgcacttgaattgtcacaaagcactagaggtgtagtatgaggaactgcaagttcttggaggagagtctgaattcagaggatatcagctgtcgcagcagctaaactcctatattctgcttcagttctggacttggagaccactttctgctttctggaccactaagataccaagttagggccaacatacactgctgcaccagaagtagattttctgtcatctgggtgtgaagcccagtcagagtcacaaaagcccctaatggaaaggtgttgatgaggagaagcagggcacagaataagaccagaatagagagcacctttaaggtaaggtgaggccatgaattggcaaaccttgttaacagcaaaactgagttcaggatgagtgacagtcacat

SEQ ID NO: 4166 - DNA, 1043 bp, Glycine max
gatgcagaaagaccttcctactttttgtgtgcagatgttggacaggtttgtgaatttagtggtgtgttcaatttatacaacaactttacacaatcaaacatttgtgcattacaactttgcaagagaccaaaatgtgcattttgaagtgagacataattgccagttttcttaatagagaaacatgagaatttctttttctttaaattctgattccttgatcatcttgattcttgaaaactgtaaaaatacaagtagcaagcaccaacttgacttataatatcctttaatcatatctagcatagtgctataaaacaggttcatcatcaatagacctttctttacttgtaattgcagaactgttaacattccaacatagagctattgatccatttatatagtataataacattacagttaaatccctagataggttggagtttgttgtgcctcaagggtaagaacttttaaaaacacacgaatacaaaaaagtgtaactaaaaactttaacttctactctattcttaacaatctatgcttcctttaaagtgttacctaattttttgagagtttagtggaacattctcagtaacttaattgattttcaggatgtttatgaggaggtggatctcatcaccaagggtggaaactatggctggcgtgtttatgagggcccctatccattccaaccaacacaatcacctggaggaaatacttcggtaaattcaataaatccaattttcccattaatgggatacaaccattctgaattaaacaagaatgaaggatcagcatccatcactggaggatatgtctatcgatctaccactgatccttgcatgtatggaaggtaaagaagcttcttccacaatacagtttgtcaaatataacaacaaattctaattttattgggggttttaaaaaaggtgagtgactgtgacttcagttgcaacatcaaggttgtgagattttctacaactgcattgtgaccgtattagctgcatttatctacaatatcttgcaatgcaatggattgcattaaaacc

SEQ ID NO: 4167 - DNA, 1148 bp, Glycine max
aatacatttagcatttcccatgcgttgaaactcattatcagtgttatggtaggaaaaataagaatacactgaggaaattcattttccaagtaccacattccagagcaacaccatattggcatacaaatgctttgagcttaggaagacgtactaacttcagaaatacaacagtaacagaatcaaattaaagaagtaggcagcaatatgtgaccaatgtctggcattggcataataatcatgctaaacatataaaagcaggtatttaaggaagagcaaaaacacaatggttcctgttttgagtagggaggtggggtgcagagaagatgagacattaaaaacaaaagatgccattaagctttaatggaaatatttcaaaattattatgtgtaaattgaggagtaacatacaaattcaaccatatttttatcaatgagcataccttctataaccaagccatagtacatcatgaaaaaaaagttgttccatggggaactggttatctgttcaaggatcacctaataacaggatatttcatttcatcagagcattagttaaaaaattgtagcagggtcaaggaaattatagaacctaacaatatacaaaatactgtccctgtaagtgaaaggggcagaggagtgaccaacatacaacatcagaagcttaccataccttcttagcaacagtatcattgcctttgttccccttaaagattttatccatcaatttgtggagaaaatgtccaaagggtccagagtaggcgaaaccatagagctgcgaatcaatttgatttcaaattgcttagtccttaaaaatttcacttcaaacttaaatttctgcttcatctttttgagaaaaggtgaaacagttagcacagtgtgttgatttattttcatatgatcattggttgagagttatgaaatggttaatggcaaagaccatcctctagttatcttcatggaaaattcggattttcagtaaattcgatccagtcatatagataaagtccaaattgattaagaagaagcacagttaagtcaaatggacataccatgaaaagaagcacccttctcaactgaagcttcttggccccagataacttctgagccactgcatcactaaaaccagccaaaactgctgcaggcatgcaa

SEQ ID NO: 4168 - DNA, 1267 bp, Glycine max
gcaatagcaaaatggcaattttcaattaatgaaaaccaacccacaactaagcatatacaaaacttaacctcaaccaatccaaaattatcaaaaatacattattgacaagatcacggaaatgttttattaagagagtgaaactagaaaaagcattacagtaaaaattcagttagaaatgaaacaaaggaaacacggaccttctcaaattgaattggtttcatcctgaacactggtggaagatttgcccggcacctctctaacttgattactagatcattaataaccgctgcatcatctatagaagctgtagagagactggtggccttctcatctgtcactattttcacatctttcttaggctgaaagtcaggtactatcaccctatcaacagcttcagccatcttcctagggttcttaccccagtcagggattgggataccaaatgtttctgcccgtaaaatagaagctgacaacacaaaatttagatgacccaaatcagtcgctgagaattgtagtggacgagggaatctttttggtgcagaccagaacagagctccagtactagttgcagcatcttcaggaaaagtatagatcaactgcttcacccggttaacaaaataatcctcaaacctgtggaaaaataaatgtttatgaatgaaggacacaaaaactaatatgctcacacaacattaatacaagaatgaacagagactagcatatactatcaaaggccacatactttagccgagcccaagtgatacaatcttcaaaagtttcacacttctcccggtctaggcactcaagaacacgctccaagttatcccttgcttgagcatcaccagcatttttcattgcattagtatattcacttgggttagacaaatatgcatttacttcagctggagttttctcaagcaaaccctcaaactcagatcgcgcccatgtcaagcaatggtcaatgttgtgtggaaatgagtgtacagtgcacattggtgcctgtttctcaggtggatctcttgatgcaccatagttttctgtcaggtggggaattaccatctgcgtattgcatttggctcccagagttccagactcaagaagaggcttttggaaatacaagcatctctgatcaacatatagtcttgcattaacgttgtccagtgcatttacaacgacactcaagttttcccagaaggtatcattaaacacattctcagtttcagaaccaacccgattttgtagagcttcaatattaaaactaggatttata

SEQ ID NO: 4169 - DNA, 1023 bp, Glycine max
ctggtttatgaaaaggctgttaatgcagtttacttgacttcagtgttcctaaaacacttgattgaaagtgctcaagatggtgatgtcgagttatacctgtctctccatgatagtgaatcaataccaaaaaatattttgagaggtatgtagtagcatagcactcgtaagagtttagcatgttgtctttgctcttggtctgtaccttaggatgctcttttattatttatttatttgagtttaatttgatgcactgtctgtaatttttatactgtcaaaactaattagaaattatgacttttaaagtagttattataaaattagacaaggttattaaacatggcaactactaattggatgatagtgtaaaagtcctttgcactatcgacacatttaaattaaattctttatttatttggtttcatgggaggttggtaaattttcagatatccacccctgaatctttctcttctagttatcaaaatttatccagatgctctattctaatgcagatcagaccattgaaaatcttgtcatgcggaatgtgctcaactttattgcatctgtagatgtgaggtatatcatggataacaaactggttaattgtcgtggttattgtctgcaagctttttttgccctgatgatatatgttgttttattatagccccaacacatatttcctacatctggagctgcttaattttatgattattgcaatctcaactcagcttctttgtgggccatctcctggaccgaatgatgtgaacccatttcttgatgcagcgatggctcaggtaagaagttgaaacttaaacatcgaacttcggttatttagttgagctgtactccagcgagcaaatttcaagttagttcattgtaatcttttgcaggatagccatctggttacttcagttgtgtgcaacctgcttctaaattacattacccgtcctcgtgttccatttaatagagcatcttattccatcttttatgatcgaagtcagaatagtgtgctaaagagagtcggtt

SEQ ID NO: 4170 - DNA, 1103 bp, Glycine max
attattctattgcttggtgtttgcttctggttgatctatcaggttaagcactcgcatgataagaagaaggaatttgaggagaatgatgcaaaagtgtccgtgggaactcagacagcatatcagactctgaaacttggtagaaaagatcttcatcctggtaaggacgaagtgaatcaaaatgaaaagcatgaggaagaagaggaagatgataatgtagaggatgcatataagcatgaccacaatgaacatgaagaagaaggaaatgagcatgaatctgaagaaaaaggtgacaaacgtggagtgagaggaggaggaagtgaacaagaggaagatgaaaacaaaagcaatgaggtagaagatcaaaggggaggaggagatgatgagatagacgaaaatgaccaagagcaatcagcagtggatactgatcatgatgaggagttcacggatgaagagaaagaagaggagagtgatgagaaagagaaagaaaatagtagggatgaggaaaaggatggttctgttgaaaaccacaacagtcatgaagctcgggaggaaaattacaagggggatgatgcttctagcgctgtcactcatgatactggtacaactagcaccgaaagtgagacccttttagaaaactttgatgtaacctcagcaatgaatatcacgaaatcagagaacagacctaattatactgaggaaagtaacaggagccaaaatagttcaaattttaatattacagaagctgaattgctaggtgggacttcttccaatgcaacatctgataaagaaactggaagcgacagcttgtccaacacagtcgatagctcacatttagacaatactaccacaacatattcggacagtctttctggaacaggcagtaatctgacagcagcgatctctggaggtaacttgacaggaactagtgccaatacttcatctgaatcaaaccaagctcaaaatggtactgtgaatgcaacagtcatcgaagatgtaaaaaatgtgcagacagaaggattagatcagagtggcaatatagtctctgaagaaaacctgtctggttctaactcaacagtccctggtaaaaagaaaagggacatgca

SEQ ID NO: 4171 - DNA, 1264 bp, Glycine max
agtttatgcaaactctgaggatgttgttgctgtggagaagaatggattgttccccaaaaagatggacaaccacatttatatggccattggtcggtttttgtatgatattggcgcaccttttgatgctgtgaacttggtcttttttcaagaaatggttgacgcaattgcttcaaaggggacgggttttgaacggccctcacatcatgaacttcggggttggatcctgaagaattctgtggaggaagtgaagaatgatatagatagatgcaagatgacttgggggaggactggctgttccattttggttgaccaatggacaacagaaactagtagaatactgataagttttttggcatattgtccggaaggcctagtgtttttgaaatccttggatgctactgagattttaacttctcctgattttctgtatgacttgataaaacaagtagtagaagaaattggagttgggaaagtggtgcaagtgattacatcaggtgaagaacaatatggtattgctggtagacggttgatggatacttttcctaccctttattggagcccttctgctgctcattgcattgatttgatacttgaagattttggaaatcttgagtggattagtgcagtgattgaacaagctaaatctgtaacaagatttgtgtacaattacagtgcaattttgaatatggttaaaaggtataccttagggaatgatattgtggatccctctttctcacgctttgcgacaaactttaccacattgaaacggatggttgatcttaaacacaatttacaggccttggtcacttctcaggagtgggcggattgcccatattcaaagcaaaccgctggtcttgaaatgttagattgcttaagcaatcaaacattttggtcttcatgcgacatgattgtttgtctaacagctcctctcttaaaagttctgagaatagctggtagtgagatgagacctggaatgggatacgtttatgctggaatgtaccgggtaaaagaagcaattaaaaaagcacttggtaagagggaggaatatatggtgtactggaatattatacatcatagatgggaaaggctgtggaatcatcctcttcatgctgctggattctaccttaatccaaagttcttctatagtattcaaggagatatactcggtcagattgtctctggaatgtttgactgcatagagagattggtacctgatacaagaatccaagataaaattatcaaagagataaacttatacaagtct

SEQ ID NO: 4172 - DNA, 1207 bp, Glycine max
atgtttcgccagcttgctgcctgcagagaatccacatccccctatccagtatcttcatttgcctctcttattacaaacacctttatcatgaatagctgaatactcctgaaaaagttagcattcaaattgaatcctgaaatttccctatagtcttccagaatagcagatagaaatcatgtacactttccaacttaaccacatgtgacaatggaataaaaggaagaaggagtaaagacaatattttatttcacaattatatgaaagagcattcacagttgcacaaaaatacagcattaataatggttcatccaggaaattatgcaaaaaattattagtcttaaatttaagcaattcattctcattcattctcttcatttgtctcactcttattattaagcgcaccttttatcatgaatactctcctaaaaagtttaacattcaaattgaatactaaaaatttccttttttatacacaatagaatagtaagaatactgaaatttccctagccacaatagtctttcagaatatttacaataacaagatataagattgatcaataaaaactaataattaataattaactttgttgataaaaaagaaaagatttagaaaattccaacttaaaactagtgacattggaagaagaagaaactaagggcaatggtttatttattactcaactagtaaatcaaaatgtaaaagcttaactaattcaagctttcttctgcttgattggtggcataaacatagacctgaaaatcaaagcagctgaggaagccccaatgaagggacaaatccaatagacataaaactgctcccaagtgttgtgcttgttgttgacaaaggcccatccaaaggcattggcagggttcatggaaggcccagtgaatccaccaccaagaatagccaaaacagcagttgtcacagagagcaaatacaccttcacaaaagggttcctaggacccttaaacatgacaaagaagatagccatgttgtgagtgaaagtcaaaacaccttcagcaacagcaccagaatgcaagtcaaccttcaagaaaggtcctttcagcatgtcattatacttggatggcatcactagaagaagggttttgacgccaacagcaccaccatatgcctgtacagggaaccttactgccattgatgaaagggatgagtcaggcctcaaccctgacaggcatgcaagctggc

SEQ ID NO: 4173 - DNA, 1138 bp, Glycine max
atgagtgatatacaagggtatcatagaagtttttctttaaaaaagcaaattcaaagaatttgaaaaagaaatacaaagtacatgttgttcataacattttacaccatatagaataaaaccagttggcagattaaaaaaatgaagaaaaaaaacttaattgcactttctacccccaaagtttcataaagtcgtgaattttgccctccaattttttttccaggaattttgcccccacatagaataaccactacaattcatgaaaaaatcaccccaaaattgtcttaattgtggcagtttaaaggaaaaactggcccaaaatgtcttaattgtggagatttttctacgtggggggcaaaattcacgatatttgaaactttgggggcaaaaaatgcaattaagccaaaaaaaatcattagattagattaggaaaaaaaaagggctgttaaatatggactagcaaaaacacccaaaacatataaaaaaatgtcaaattcacttggcttttataagtcaccaagaacaagtaactatgtatcatcgaggctatcatagttcatacataatattttacattcttgtcaggaaactaatacattgttgcatggatgaaacaagatatacaatgacaggaacgcagaatgtcaaaaacagttcacttcacaagcccaacgaatataaaagaaagtaacaatttaaaaaaaaaatgttaggcatgttctatgtggtattgcaagcaatagaacatctaaacattggtagattatcttaaaaacatgacttcattgaaaaaagaatttgttgcatgcttctaaattatcatccatgtaaatgaaaatgtcaaaattgctgtagaaattttccattctagacatgcattatgtattttactaaaactaaaacatgcaacatggaaaaaattctaactgaaaacatgcatcatcagtttttttatgtaactactaatatcagtaaacagattagagaaagagaaagagaggggtatatagcagcttccttatcatctcaattcaatcaacacaagtgttggcaagcccataaacatgcacttccataaaacttaccccagcttcaccttggataggttctaaaataaacgcagctatgtgttctccttttc

SEQ ID NO: 4174 - DNA, 1176 bp, Glycine max
aaaaacagttaaaaaggaacagatcaaaaagcatgctaaattttgtaagggaaaagttccgtgtgtattcaaattatttagtagaagacaaactgcctagcttacagggattttagctttttcaaattcccaatttcttgtggaactgttcctgtcaagcctgtgttgtaagaaagatccctacatgaacaaaaacaccttgttattaagtgagcttcaactgagtattgcatgccatccacaattagcctagtcaaaataaaatgtccttttgggtggttattctgtagaattttgttagagcaaattacagtaacacctcctgaacttttatcaaattacacataactccatccgttttgattttcctatatttaagtataaaaacattacattaacatcctcttatatgtttgaaaacattacactgacactccctcagatcttacactgacaccccccacaagggaggtgaatgcaatggttaaaaaaacaaaggacgttgctgtaacttacgcattttgttaagagaaatgatttggcaacttcatatacaaaaattcgtatgactgaaggagtacaaatcatcctctcaaaagaaaacagtaccaaatcaggacaaagctcttttaatgtaactacagaattagtaacgaagtatccatcacattttaaatcatatagtggattaattaagaatttaagatttaagatcataatctatctttagattaagggtgtacagtactatatacgctatttcactttagacatcagttcagtttagaagaatcttatccaacaaatcacaagttcagaaacatttaagcataataataatttcaactcacagagtatctagttcagataaagactgaattgccgaagacagctggcctcccaaattcaagcctggcagtctcctgaaaataatagcaatttaatttttttcagatttattttattttaaataaatagaaagtagtatgaaacaacctttgaactttgaagagagcaaagaaaccaaaaaactaacaattgggtaattcttgaattgctgcaacgaattccatcccatccactgccacaaggatctggacccacccaattttgtggcttgttactccaggattccgtaagagaatttaggccagaatctgcaggcatgcaagcttt

SEQ ID NO: 4175 - DNA, 1245 bp, Glycine max
aaacagatgcagaaagcatacagctgagaaacattgtcaaacaagaggattttatggcaatacacgttaatggccagaaaaatgagattttccaaatcaatgaaattaaattcctcatttaccatggaattacttttccatgtataactttatacaggcaattgcatcaacataaattcgataggtaagctaaataaatgatactagcaaattcaactagcttataatttatggggacctaccaaccgctcttgctctgacaatctaccagagaaacaactactttttattctcttaattgcaacatctgttcccctccactttccatgataaacagttccaaatgttccagatcctaactcttgcaattcttcaagatcagcattctcaatattctgcgtttttacaaatgaagcaccagattaaacacagatacaggtgggttttaatctgccttcttctaatcctataaaaacagcttcaaggagagtaaatttaaaaagaaaaaagaaaaaaaaaaagaagacaacaactggaggaaagattgcattacaggaggaattaggcctatctggattttctcatttgcaaatactgccattagtcctcaagtgattaacagcaatataatttataactatgttatctgatgattctattttgtaatagttcatgaaaatataatttgttcacacacaaaaacacatgcaatataatgatattgatagggtctgacagtttctgggtttcgtattatcctcttattgagtttggccactagtctcaaaagggacaacaaactttttaagctaggccaatttattattttaatgtaagcaaatgcagctccactctaacggttttatcaggcaaatgggtcttgctcagttcaatgacaatgttagcatcagaattcctagaagaaacaaaacaatagctttgaaaaaacaatctatcctgaaacacagtagaccattggtctcaagactcaaatatcactctttactagtaaacatcatatttatgaaattcaactttgacaatacaatttagagtgtaggacactgccctcgtgttgaaaaattagtcagcaaaccgtttcaccaaaaacagagccaagagaaagaatttttctttttaccaacaaggtaatgttaaatgaaatccaaacattcatcataatatcgaagatggaaatagtattattcatctatatactataccaaactgcaggcatgcaagctg

SEQ ID NO: 4176 - DNA, 864 bp, Glycine max
ttgcactgcctgtcggattaccatgaagaaagaaacaaagaaataaagaaagaaaactacagggcatgaaccaaaatcgataagataacaaaagagggagagaaagggaaacctaatctgaatttgacaacaatgaaagccaatgcgagtgaatggggagagaagagtgtacttatcacttgaagattgaagtgcgaacaaacaatttgaatcaacgtcagggtttctgaaggcacaaggttcttggactgaggtttgtttgattctaaaattgggggatgcactcggggtaattggtataccggctgcgtgctattgtgggatgtgggctgaaaatgtaacccatatggacaggctcatgtctaaaaaacattttcttcttcttctcaccctctacttccttagctttttgtaaaattagtttccgtaaatttcgttgtttaattttatatgatggtttccgttaaagacatttttgtcaaaataaaataaaataaaggtgagggtgtcaagatcaaacagagtatcaatatcatgggccatatggacataagctaaggaactgctctataaaaaaaataaaaacaaatatatattaagtcttattcgttatcacaattttataaggaccacaattattaagacggtggcatatcataaaaaacatagaatcaagatttttttatttattacctagcatggtagttaatcgtgcataatattggtgttattgtgccagaacatcacacatggcaccctactcctccaagcatcatcatacctcacctggtcattgtgactggaacagtgcttttcacggccaaaatggtggcatgggtgagcaaatcgtgttgcaatgccgtt

SEQ ID NO: 4177 - DNA, 1076 bp, Glycine max
atatctgagtcagaccctttttttggtgacaaacttgatattgctgagtccaatggttttggtgagacagcatactttgacatcttctacagccgccctcttccaccagggttgcttccatatctgagactggtagctctagggggcactgatgcattcctgttggagtcaatatttagaaactccatctggggtcatcttgaattgcctgtgagccgcgacaatgaggagctaatatgcagagtggttagagagacctgcaaaactgcccttgctggttatcatacaaccattgaagaggtatgattttggttttaatttaggatgagagaaaaaaaaaagcatgcacattaaaggattttcctctggtttattggtataaatatccatatatcccatcatgaggataaaccatgatgaggtttggttaatgtaacacttttaggggaactatggcatcttacaatggtgtgtttggaatacaggaaaggaaagagcgaggagagaaaatatgaatagcaaggcattttattttgtgactgaaagaattaaaatggaaagaaaggggatagaaaaactatcttttagaaataaaattcaagggcctgtttactttaagagaatatttaattgttttatttttttgttttcacttttaattacaaaaatactaccttgtttcacattatttcttattttcaaaaatttgtacaagaatcattaaaaacaattttttttattgttttatgttttcattatttcctatatacacttttgaaaacaaggtaacatttttgcaattataagtgaaaacagaaaatgtttcctcatagtaaacttgtcccaaatttttcttcctttccatttggtcttcaattcaaatttcaattttttttcaccccacactttctttcctcccaatcaaatggggcctaaactgtgaaaattttgaagctgattgagctcaacaaataactgaacaaagcaagtgaatggcaggatcaaaagttgaaagaagcaaagctagattcaaggcatgcaatagcagttggaattcgagaaggggagaagcagct

SEQ ID NO: 4178 - DNA, 1052 bp, Glycine max
agcttgcatgcctgcaggacacagaaagaatgagggagctgttagattggttactaagggtagtggcacctggcctgatggtaaggaaaggcttcaggataagggcattgatactagaatggttgataggagagaaatctgggctgagtcccgaccagttggaaatataacagttcagaataatgctggaaaatttcatcccagggttgatgaaatgcccaaatctttggaaaataatttttacaaacctttggaagcagcagttgaaggaaaagagagggttaaggaaaaaaaagatgataaacacagagataaaaagaaaaataaagagaaggggaaaaaaggacatgggaaggacaaagacaggagtaaagaaaagaaaaaggaggagaaagcaaaggagaatgctgaacatgaaaacagagagcagcagaataaattaaaagaaagcaccaaagctggtccattaggctcaaattctttcacacaggtttccaggcacatctatgagaattctgctgttggggaaaatctcaagaaacggaaggacattgaatcaaatggaattatgcatggtgagtgtcatacatgatagatcatcattttattattggtgttcaatgatccattctggttgtagttagataaactagagcgtttctcttgttagatttaaaatatcatttcattgacctaatagctgatatctacatcctatgagattctgttagatttctaatgttcctacataattattttcatattttgatggttaatatattttttcaattatattgtattttgttgttggctgacattcatttctgaattttctgacagcaaatgacaattggcccagtaagttgccaacgccctccccctctccctcccatctcactgaaaatgggaggatattggaaccctgccaaatttcccttcagaatacatctgataataggctagcagcagcctctaatatcaaggttgataacaaaaaacgcaggacaaatggcatcattgaagttctaccatctgcaggcatgcaagctggc

SEQ ID NO: 4179 - DNA, 1255 bp, Glycine max
atttgttgttcagcgtaacagaacctctttactggttataaacttcattgtcgaagattggtggtttggccattcaaatggtgcagcctaagacacttgtaatagatattttgcagaaaatggatgttcatttggttaggtgcaattacgaaaattacatttcagattaagtccctggtatttaatattttgttgatccgtatcacgagtcaatgtcaatatttgattaaaaggaaggtgatgccagcttttgatgatatagacaattcatgaaataatatgcgataaacgatgcaagccttgaggaggtgcaaaattctaaacagctcatctgaattcttgacgtaatttaagccttcatgtggaaattatgagtgcagaacagttacccctattaccagagattagccacaattttacacgataggtagcattttgtcctataccttctgctgcctttgttattgaatggaactaattgaccaatattttgaagcaggatatacggtatgtggagattatgatggcacaggagatgccactgaagatggaattcaacctaaacttgttcaataataatttttaaagatagtttgtcttgtccctctgtctcatttctttttttcattttatttattttttgaagaaactaacacgatttggcagttactagttagtatcagctgataaagatagctgagcctcaagcgcagttggtaaaatcaaaatggggaagggaagtaatttggagtgacatcaaaatgaaaaccaaacacctgcttttgactatgatttattttaggatacagaagatttctctaaagttcgcacaggttacaactgctgaagtatctcttaacgcttatagcgatgcaattgcgttccacttttcaacgttccccctgctttagcttggatggaatctgatatgcaatttttttactaagcatgttggcatttgggaggcttcaaaaataaatattttataaaatctatgtatatttaaactacaacgttacatgttcacttactgccttggtattcatggacgaaaaatgagaaggaagccaggaatgtttgttgcagcctctccacctagctgtgtttatcctaaatagttccatatgcttctgccatgattaatactacaagcgatgtccagccagtaaatggatgtgccccttttcccttacccttagtctgttcgtactgttcccacaaaaatcccgtctgtcgataattgcgcactattttc

SEQ ID NO: 4180 - DNA, 1233 bp, Glycine max
atttgagattcgtttttaatttgaaaaataattttaaagttcccttaagatttttgaatccttcgatatgtagcaaatttcgttcagatttctttactattaatttaattttagcaacaaaaaaaaaacattcaaacgtaaattactttatttcaaaactaattagtttcaacttaaatcaattttataaaaataatttgtgttggcactaaaactatttgagtcagatttgggccataacggttgaggggacagattgcaattgagtctaaagcacccaaaataagatagcttacaattatttaatgtatcccatttatttatttattgcttaatatacctccaagaaagttcctgatatctttttttcttacccttcctctcccaaacaaacccctatctctccccaaacatgcatgaccatcgcactccacatctatccaaccacccaacaccacagtcacacccaaatatggtactgtaaccacccaccatcaccttcatattgcaccaaattcaccatcgcactgcaccactgcaccctcgtatagttttagagtgagtaatatgtaatacatacaaccgtggaggtcctaagaaattttttttataacatgtttattgttgaagtaatgtctctttagttttattttagataaacatgctattaaaaaaatacttaaggaaccattttgcatattttaaaaaataaaagatcaaattataacttataataaagataagagaccatttagcatttaaaaaaaagtttaaatatatttttagtcctgtaatttaatatttttttattttcattttgataataatttttttattttagtccttacatgtaagatgtgtttttttttgttcttaaagtattttaggagctttgaatagtaaaaaattactttgaataataaaaaaatgttatctaaaatatttcaaaaataaaaaatagaacaaacatattttaaaaggtaaacagaaaaaatatttatagaaaaaaataaaaaaaaagttaaattatagagattaaaaattgtatttaaacttaaaaaaaataaagaatcaaattaaaaaaaaacaaccgaataatttagccatttttaatttatcctctaaattcacaagcatatatataaccacagttggcagaataggtgaacaagagtaatattttttttaaaaaaaggtgtcagtcattgcaatattgcatgacttattgtttgt

SEQ ID NO: 4181 - DNA, 1006 bp, Glycine max
ttgcatgcctgcagttggttcacgcatgtatggtggttcatggcgggcaagtcctgttcatatatgttatgtatggcagcttaaagtgtcagccacacaacaaaaacgtttagcagcagccagcagactacaggttgtcccataagcatctccagaaatactataattttatattaattagtgtagtacttagtttattttatataatattaaaaatagtaaaattaatttatttttaatcataaattaataaaaaaaaattctatatcctaaatgtttatttgtttgttatatcctaataaattttgttcatttgtgatgcaaagcaacatttgggatataatcaaattaaaagatcatcctatatattctttgacatatttatttttaaattagaaagatgttcacaaaacaaatttattttaatatcaattataatttaaactaagaaaaataataaaatttgactcaaattaataaaaaaaaatgtacaaaaatcccatatacaacttaaataatattaaaagaaacacatacaaattaaataattattttttccctaaagcttgaaaccgactagcacagttttttcaacatccagatccacctgtttccaaacacaggcttaaacaaaagatcagaaacaagtaaatgtacaacagcgattaccacacacgttcaagtgcttttaactggtcatttttttgacatttttaccgtcaattattataaccggccgctacaaacattttttttaatgtcggagtgtcttttttgcactaataataatactaataataaataaataaataaataaatagcataatttacctgactggttaggctgctggtggtggtcggagatgaggaggtgagtggttggttcacttacgcataataatatatatgctatgaacggagatgaagtaaaactataagagatgaagaatggtgcgtggcttgcggctgaaatggagagtgaggggatatgcaagctagggttggc

SEQ ID NO: 4182 - DNA, 1221 bp, Glycine max
ctttccatggatactactttccttatcaattttattgtattaattctagatgttccaaatagtctatcttcactttaaatagttaaattatcatattgagactctagggaggagccattcgccaagaactgtactacctcctcaaagatgagaatgatgttcatttcacatttgggagcataggaggaaatgggattaatcaggcaagccagggcatggccttgtcgaaattctgcctcaacattgcaggggataccccatcctcaaatcgcctttttgatgccatagtaagccactgtgttcctgtgatcatcagtgatgaaattgagctaccctttgaagatgacttggactactctgacttttccataattgtccatgcctctgatgccatgaagaaaggctacctgctgaatctccttcgttcaatcaagcgtgacgagtggaacaagatgtgggaaagattgaagcagattacacaccactttgagtatcagtatccatcccaacctggggatgcagtgaatatgatatggcagcaagttgaacataagatatcttcgataaggttcaatttgcacaggaagaacagataccagagatcttagcttcgtgttaagactaactgaaatgctgagattctgttacattagaatctgctgaccttggtcagtcaagttcaacatgccagtggaagacacaaacctactctcatgttttgccactagaaggcttctttttcttccttttaattttttctttttgctgaataacatattgttgatgaaaaatagattttatattttaatgtcgaagcatacctcattatttgtcctcttcttggcatatgaatcttaggaaaaactaaaagcaaaaaaattgattggaatatactaatagtttagaagttgtttatgctattattcaatcatgaattgttgtataattaaaaattgttattttcttataataattattttgaaagtcatatttaagataattttttattagtccatttataatgacaatatattgaaattaaatttaaaaaaccttaattaaatcacaaattattggtaatttgggtaatttgtttttcccaaagaaccattatcactaatgctgtgatggtatattagtgtacttgtcacggcattgatgatcatggtttgcattatcgcaagtggtgattaattatcattaatttgcaaagaagaaaat

SEQ ID NO: 4183 - DNA, 1006 bp, Glycine max
tgtcagttcttcagacccttgctcagacacctccagctggggggggcagcatgtttacagtatttgcacagggtaatattctgagcacaattgtactgtataggactgttaggattatgttagtgttccattacaactgaaccctcagtatctcgtatcaatatctgttgtatgattgtgtcccatcagttcgataatataatgtatatttttttcattctcaaaaaccctatcaccattttctgaatcttaataagggaggtgggattgatgaatacctcaaatgctacttattctgtgattgtgactggtgagccatgtctaggtttcaaggacaggtggagatgggcaaggagaccagcattgcctttattgttcacattagttttagtggttgcaaagccaaatagttatggcagaacaaatcatgaagcagctagcctcaaaagcactatgatagaaacaatgagacctccaaaatttactgagaagttagaagtatgattgtagtttaacttctctcctttccatcctaaaggattatatttgctatggcatacgattatggaaagttacattttagccgcatgctaaaaatcttaaagtgcatgttggtttccagttaaaaatccccaaatggatgttctcacataagcaagaaaatgtttttttctcatgaaacagagctttagaattcatgtttctctgttcaacatttaaatttacacaaaagcacactagattccaagcattgtaatgttaatacctatttaaatttacaatcaaggttattcttcctttccatcaactccttgtttccaaatgattccacaaatatgccacaaaagtatactcaacagcaatgaacctatctccaatgcctaaactatcttagagccatatcaagaaagaacatatggatatttttggggatgagggatcatgcatgccaaaggttgtcataacactcacagtggaaagttcagcagataattgttcttcgttc

SEQ ID NO: 4184 - DNA, 1023 bp, Glycine max
caaaatagctttgcaaaacatgagacagctaatgaaagaaacattaccaggtgtgccaacaccgattgtatcccccagtgaaatctctgagcaacccatctcataaagcgattttgccacatatgcaacttttgctggagcaatatttccttccagaggacatccgacaacacatgatatatatctgaagtatgcaatcagtcacacaactgatcatatataatttactattatgactttgaaatttaaagtgaaggttaacaaaatactgtttgaagattattcaaataatttcaaggaaaagatagtagattctagtaaggacaactaggagtcaaggagtcattctactatctgcaaaaccatctctctactcaaaaccatctttcaatctatgacctcatccaatcaaatgtaagttcaatatggagattttatggttgacaacaatctgatgatgagaataccaccaaatattgtcataaacaaaacaaatcagtgtctatttcaatttcaaattaaatagaaattaatgcctaccatttgacctgagtccactaaaacattataaatcctacagctaaatgaatctgtcaacatgccaatatatttcagctccagggttatttttccactgaaatctaaattaccaaaccattacactgccatataaatccaggtcaaagtggaaaaatagatagccaacaactgatgcttcaaaatttttattaaaattttaattctaagtcccttcttgtcttcaaatcaggatgtgtccaataaaagaaatgaaccatatatatcaataatcctttctgtttaaactagaagtatatacacataaaatttcagaaaacacaaaaatttatccattatttactgtagagatggacaagtatgaactgaaagttatacccacgaactgggatcgagaggcttctagcagctgaagcaatatcgtggcaacgagcaagattatcctcaatgctagaattcagatttgcttttgagaatgattcagaa

SEQ ID NO: 4185 - DNA, 1124 bp, Glycine max
attgcatatatggtgtaagagtctggggacaacaaacacaaaaatattaggaaaaactacaagtggttcagtttcagatcaaagtttgcagagtggagatcaagatgcagaagaatcagaagaaatacaagaaaatgaagggttaggattctacctgccaccacacagactcaacaattcgagagaatatccatgcttcaaccttttccaatgcaactaaaaatgtttctggatcttcccatctatgaaaatgtttttctgtattgtctttttcttctttgtgaagagtgttaccagttccatcactttcactgttgatggatggaccatcaccaaagtgtatattctcaacttctttgctcacaattgctctcagcaatattaaatttgagaaccaaaatgtcaacctattcatgattaagaagtttgttaagaaatggtatgaaataaatgagcgtaatgaaaagtatcaacaggtctttttgaaaatgatgttaaatcaatcaaatttcagtagatacaacaatcgagccttgtcccagtagttggggttggctacatcaatcaaacaatgctgttgtgttcaagaaaaggccaattttttacataagcgaaaagaattccatttagtatcttagatcaatgcattcttaatgatttttcataaagttttcttcctttacctattttaaaattttaatttagttcatttgatccattttccttattgaagcctttgttggtcttctcctagcaacaccaagtcaccttagatgagtatcaatcatctcttcaaaaggtgcttccccaactttctcctacagtcattcacaatcttaacttttttgcacgctcaaacttcaatagacaagaaaacactatagcagattctcaaagataaatctccttgtcagaaaaggaagttagttatattaggttcagcttttatcgaagattcttgctgcactttagattcataagaacaagatcttcaattatatgctcctgaacttttttatgtcatttcagcatagttaaaaaaaattatgaaatcgagttttacataccttggaacatcatttccacatgccttagaaaccaaaacaaatcccgagacagcactc

SEQ ID NO: 4186 - DNA, 970 bp, Glycine max
tccctttcttgcggaagcgcatggatgaagttatagggaactttctacgagaaggccttgaaccctcagagaacatgattgcgcacctcatagaaatggaggtattgcactaaaatgagtttacctattttgcttgtttagttgcctgagtatggcttggggtgctgtcttatcagaacattggtgaacagtctctcttcaaataaaatggaaaaatcatttcaatttaagatcttcataagtttttggtgtctagtaggaaccattgacatgccacgagtctgtcagtcagcttattcatatcaattgtgatggtcagtctattagagtgaataatcaatttcaatgcccatgatttcttatttgaactactcaattatgcagatggactacataaacacttcccacccaaattttattggtggaagcaaggcattagaaattgctgcgcaacagaccaagtcctctagggttgctataccagtttctaggcaaaaggtatacttgttatgagatctaattccaaatatgccccatatttttcatttgagatatgtattcttatttatgttggcctttcttttctctttaaattttcttattaatctcctataggatgctctggaatctgataagggatctgcctctgagagaagtgtgaagtctagggctattcttgcaagacaagctaatggagtagttactgatccggtttgtaattgtgtattgtttaattgacatgaaattttccttaatatcttactgttattactcaattcttatgatacaaatgaaaaacagggtgtccgtgctgcatcagatgttgaaaaaattgtaccctctggtaatttgtatattccattggcttaaatatgtttgagatccccaatatatatccgatttttgtttgaatctttataatttttttcgttgttctgagtccatgatatattaaaagttttgttccttg

SEQ ID NO: 4187 - DNA, 1252 bp, Glycine max
agcttccatgcctgcaggaaaaatatatatcaagagaatgcacactaatatcattgagagagttatttgtttggatatattctaatacctcttgaatgattttccaagctgttctacttctttctctagagcaatgtatttgatgatcaccaccctcctgattcaaagttctgaacattgacatcatatattagccacaccaattcctggaacaaaaagcacgaaaggaagaaaacatagactgaaagaaagtaaaagaaggaaacaaataaacaaagcatatcaattgctcacatgaaacaaatgatgggagtttatcatgtaccagtcacagtgtcaaacaccattttacattatttatttcctcgcccatactaacaattggataaccaagaagtgaagcagttaactctaaaatgcaaactaaaaatgttctcctagttcaaaatacctccaatcaaactttaaaactcactcaccttccagcatttgaatctgcatgaccctgtaacaaagcaacaattgaaggtttaattctatactgtcacgaaaattagaaaaaataagtgcagaagttctgaaccaaaaacaaactaaacaaggacctaaccttgtagctgaagacaattccaaaaaaagcacacaaaactaatttaaaaagttactagttctgtggtttttcattgaaaaatcatacagatcaatattaacataaaaaaaggaggtagctagataataagaacttcttgctgtcaaaaaaagataataagaacttctattctcatatttctcaagtagaaaaattcacaaattaagctattaattgttccaacaaacaaaccaagtccttacacatttacatttccatatatggcaatctaaattcaagcaatcaaaacagcccgtggcgacaaaatcaaactttcagggaagaaacaggaggtaaccacataatgagaacaagaaacacagcatgcaattaccattcctcaagtagaaaaatcacacaataacctactgatttgtgcagacagtgaaccaaaaatcctcaaacacttggatttccaatctatgccaatccaaattcacacaatccaaacagcccatgattgaattcagcaaaatcctcaccagaaaaaaatgggcattttgaataatttgataaaactgacaaaaacacataaaagggtaatgtttatttttaataattacatgatcagtgtataagcaggtaaattaaagataccgttgt

SEQ ID NO: 4188 - DNA, 1240 bp, Glycine max
ttgcatgcctgcaggttaaattctatctgcacacttaagcacacacttatagaaccaagagcttgcatgaatgattctgaatggaaagcaaatgattccaatagcgtggctttggagaagttcaaaagagacagcgtttatattgacaaaaatggcagattaaggaacttcaatcacaaaaaagtgtcaaggaaaaaatgtaattaacacatcatggaacatgagtttcctcactagctcattgaaacgtgtgtgtcatgtttgaaaagtgtgttgttttacatatgggcaggtggttctttgagaggacgaggatggaaatacggttctgggtttgttgatgggatttttcctgtgctgagtccaactgcacagcagattctggactatgttgaaaagggtgtggagagtgagagcatttggggttctttggacatgcttcctcccactcttgatgcatgggatgatattttcactgtggctgttcaacttcggatgaggaaacagtgggattcaatcatttcggtgagaaactcatccctggttgcccttctaacttcttaacttcaaaaactaatttatctcttttcagaattattcaatggaatgcctaatgatttctctgaaaatctataacaatatataaagataatacggataccaattcttagtgtagacatttcttaacccattttatattcaactgatagtgatgtattgtaactccacactcaaattttagttttctttttgaagtagtgctaccttgtaaattaattattctcaaaaaaatgtggtgtctgtctttctgatagtgtttagtaatgatgatatttgtttcactcgcttctagcaaatttaccttactggtacagtttttatcagtcgaattatttgaagcgtgaaggttgacttatctcttgtaacgtttcaccattgaatccatcatgcattcatgttcatgtgtcacttgtacaccattgaatccatcatgcattcatgttcatgttcacttgggcaatattatgacactaattttttgtttttgtttattgcaattcttaatttattttgggattggctagtggatttgtgttgcccgtcataacagaaaaaaactgtacagatatgtagatggatactgctaaggagctcctttaagccagatgtaatctgctataatttactcatagaagcttttgggcaaaagcttctatacaaggaggctgaatccacatat

SEQ ID NO: 4189 - DNA, 1217 bp, Glycine max
tttaagctataccagtatatcagttttttttaaagaatatattagttttgtatgatacgcttatatatccacctcaaatcattggtagcatccacaagaatctacttaattatttgaatttgaaattttcacaagtacggcatgattgttttctgaaaaaaagtacgtgatcctttcacttcaacaacataattttctttttgacatcattaggaatgtacttattttttctaaatatgacaggaggagccaatttcttatgagttaattattatacggtactcagttgatttaaattaagttgcattcctagatatatagttcaagatatattcaggatcgtctgacgacaaacgaagtctattttttttttttaatatgttggacctttttgttaaaatatgtgacttatatgacacttttttcactttataaacactaacaatacatatttttttttactagaggacttaaaacataacctttagttattttacatttggaataatttcctagacatttgatttgctaatatttcctcacatacatggatcaatggatgtgtacactgttcaaattggctatttaattatttttattgtgatgattaatttaggaatgcatagaacgtgtccttaaagttatgatagcctgagagtctgagacgaaaccctgccatcactacagcagctatttacgtgtctacaatgtggcgatagatttcgactcaattgatttgaactcatggccgtaccgatagataagaggcatgaccatttatgtactttatggtaacacattgtttcgacataaagtacgtatgagaaacgataaaacttaaaatcatgcctttatatcttgataatattagatagcattatttgatctaagaatccactgacaagaaaagaagacatttgattaaattatagaaataatctgctgtaaaattttattatgttcatatgtagatagaatgatttatttaatgaaaaaattatatttattttttttatatatattttttataaccaacaatcattatattataaaatatttgtgatatctgacctaaaacaaaaataaaatttgatttaattgttatcttaattaaattaacaattcttacacacgaagacgatgatttgtattattattatttttatggacaaaagataaattttattaagggcaccagtggtgccctaatattccaa

SEQ ID NO: 4190 - DNA, 1184 bp, Glycine max
tatacgccagcttgctgcctgcagctgcaattaaaacagtacctgcaccgagtagcaaacatagcatcacatgtggaggaatgtcaattgctcctaatcgcccttcattccctttaattgcagcatctatgcttactgatttttcctttgctacatcatcgttcacggcagcaacatctgaatctaaacttatgtcactttgctcattgacattgagtttagcatccttttcttgtgcctgctttgtatctgactcatacgcttcaacacagatttcagcaacctctgaattcaagcttggctgattttcaacatttaagttagcctcagcttcttgtgcaatcgttgcttctaaatttcctgcttcagccagttgctctgattcgatcatattgagtacttcctcagattctggagcatccataatattttcaactccagtaattgttgcaatatcttgctgaacttgttcttcatacacttcataatgctcctccagaatatccccctcaacaacctcatcactgtcaatatctgaggcagcatcactctcatcagcgtcccatactggtacgtgagtctcacctatttcattttcaccacgaccaaatatagggtactgatccaccatggagtaatcgtgctgaatggtcaagttataatattgcaacttggccaaattgtgtcctcctctaacatctgaaatgaactctgaagttgaagacagcaacttggtaaaccaaatttgcaaatttcgagctatctcattgaaatttgtttttgcaaactgggtgaatagatcaaaattagcccttgcaaactcaggaaattcagatgatacataaaccttgtagaaaccttcaaacacagttcgatcaatcacaggtaaatctgtgactgtgactgagattgatacaaaagcaactgcaagaagcaagataagagcaacagcctttgctctcactgtgaagcgtggttttggaacttctttttcttcaacagattcccctggcatgagagtcctcctagcaggacttagttcagaaatttcaccctcttcttccttaacagtttcatccgaagaagcatcctccgattccttctgtgagacttcagactgggaatcctcagtgacttctgtatctgaaaagcttccagatatgaagctgtcctctaattccctt

SEQ ID NO: 4191 - DNA, 1006 bp, Glycine max
atgactctgaatatggatagcattgatttcatccataaaagccactgctacatcatcctcatggtcaaataaatttctcctccacttcaagtcccatctccaattaccctgggaaaaatttctcatcgtagagatggtattattctgctgtctactaatcataaacaactgattatactgctgctcaagattacaatcatcccccaaccatttatctttccagaaattaattttatccccacacccaaccttccaaaccatctgatgttggatagggctaaaatcaggttgctgatttagctttctgaggtccctccaccactgggaatgccaagctttgtctctaccattcctgagttctgatcaacccccatatttgaaaattaagattctggcccacaactgatgttgattagaggataaagcccagatccatctacccaacagagctgcattgaatttagaaagatccttaatcccaaggcccccatcatccttggggagacaaatcacatcccacttcacccaagggattttcttatgctcttgatccccccccccccccccccccacaaaaaattcctttgcaaggacaccaatttggcaacaattctttgtgatatcttgaaaaaagataaaagatatattggtagggcagtcaagacagagtttatcagagtgaccttcccagccatggataaaattttctggttccatttagataatttagcttcaaattttctgatcaaaggttcccacaccaaacaacttgaaggcttagccccaataggaattcccaaataataaaaaggggtttccatatgactgcaattcaagaattgggctgcatcataaacccaactggtctcatccccaaaaatcccgaaatgactttttgcaaaattaatcttcagaccagacaccatttcaaaacctctaagcatggccttcaaagctatgacattctcccatgaaacctcaccaacaaaaactgtatcatccacat

SEQ ID NO: 4192 - DNA, 1126 bp, Glycine max
ttagagggaatgtgaattatgtgatgagtctgaggagttttgtataattataagaaaaatgtgtggtttgtgtaatttatagagaaaggtgatgagttttgtttaataataataacatcatatgttttgatcgaagatcgaaatgtgttggaagccatttggtgtgtagaattgagttatcgatgatgccattatcatacccttcctatctatctatctgtctgtcttcggtgttgtacaaacatttttattttaagaacaatgaaaatgaagaaattaatatatataaaatatcacaatgtttcatataaaaacataaagtttaatttttatatctttacattatggattaattagaatacatgacaatctcgttttgatgagagataactttctgcattttagaggtttcctctgcatgctgcatttttcgagtcagtaatactgagattatcttatctcttgtctgaacttgctcaagaaagcttttatatggaacgttgttgatttgcttttattaagaattaaacctaaaacacagaatacatataaactttgtatggttataatttatgaagtgttttttggtgaagggttgtatctagtatggttataaatggtaaactggtgtttaaagggaatgtgaggaatagggagttttgcggggttttttttgataaaaaatatcatatgttttgattgaaatattgatgatgccattcattgctgttacaacagttttatttttttttttttaaaaaaaggcaaagcaattaatatagaaacagtaaagtgttttaaatcaaatgtattgatgataaacataaaatcatatcaaatgtattaactttttgttttaaaaatattaatattgttgaacttattaccaatgcacagaatacatattaataaactaaaaactagttgtattgtatttaattactcttgtttatcaggttagcaaattaaaaagtgcacaggtaatcttgatggaatgagattcccggcaggaaataagaagtgcacaaaattatcacccttggttttttttcttccatatattataaagttaataaaatataagggaaaatatataaaaatcatggattttgaatgtgtaggagct

SEQ ID NO: 4193 - DNA, 1204 bp, Glycine max
aaacatcagagagagagaaagagagggagttatttattaaattgaaggaagcatcagagggttgcagagagaaagagaggggcatggcggcgtttgcagtgcagcgatagctgtaaataacaactgtggtactgttgttggtgctgtgctatgctattgctattgctatcttctctttattattttaattattattgcataatgcacatatattcattcactcacacgctatattattagagtattacaaaaacgctgaattcggagagtgaccaaagaaagaattgaaagcgcgattaacgctgcgcgacactgttggacgcctgtccttaaccaacgaagcttcaattaccctttccccaaccacaacggctaatccataacgagatataacaacagaaacacaacacccaacacactcttttttagaaaaacatcaccaaacaattttaaaaattaattagttttttttttttttttttttgtgtgcgcttctagtattttgtgtttaatttcggtttttggttttgcttgtatttgtgtggccacaacactattgatgactctagttgccattacacaacacaaaatccaaccatcaacagtgtaatagtttttctcaacataaattcaacaagttctctacctagctgctattgttgttattgttattgagatattgatattgatatcattattattattgttcttgacctcgtctcgcactcccaaatcccaattctcaaccccacgcctcattcaaagctcaaaacccagggaattatttcaaccaatagttacaacttgcaataacttacgacccttgtttttcttttcttttttaattctctctctctgttgttatttttacatgcttgcgtctttcttcttcttcatctgtttctcaatatcctacaacacacagcgatcgagttttctgatatggattttgggccacaattgaagcccgggtcaggtccagaacaatggcggggttattctcattaggaggaggaggaggaggagggcgaggaaacaacaacaacaaccaaagcagcgagattccaccagcggagaccctattctggtacagcagcaaaaacgacgacgtttcgtccttccaccgagggtttgagctatggaaccagcaggaccagcaccaccatcaccatcatcacgtgatgcatccacatgcgcgtcctct

SEQ ID NO: 4194 - DNA, 1191 bp, Glycine max
aaaaatcagagagagaaagagaaagagagtgaattagtatttattaaattgaaggaagcatcagaaggttgcagagagaaagagaggggcatggcggcgcttgcagtgcagcgatagctgtaaataactgtggtactgttggtgctgtgctatgctatgctattgctatgttctcttttttattattattattattaatgcataaatacacatgccagtagtatataataatgcatgtatattcacaaacgctgaattaggagagtgaccaaagaaagaattgaaaccgcgattaacgctgcgcgacactgttcgacgcctgtccttaaccaacgaagcttcaattaccctttccccaaccacaacggctaaaccataacgagatataacaacaccaacactacacccaaaacacactcttttttgaaaagaaaaaaacaactttaattaaataaaataaaataaaatctgtttttgtttttttttttttttttttttgtgtgtgtgagagcttgtattttgtgtttgatttctgtttgtggtttttgcttgtattttttgtggagacaaccctattgatgactctagttgccattacacaacacaaaatccaacagaactacagtgttcataattttttctcaacataaattctacaagctctagctagctgctgctgctgttgttcttgtgctcgtcctcgtctcactcccaaatcccaattctaaaccccacgcctcattcaaagctcaaaacccagagaattaattcaaccaatagttacaacttacaattacttctttatttattttttaattttctttcttcttcttctctttcttttgttattttttttacatgcttgcttctttcttcttgtttttcttcttctcaatatcctacaacacacagcgatcgagttttctgatatggattttgggctacaattgaaacccgggtcaggtccacaacaatggcggggttattctcattaggtggaggagggcgaggaggcgataaccaagaagaaaacaacaaccaaagcagcgagattccaccagcggagaccctattctggtacagcaaaaacgacgacgtttcatcctatcaccgagggtttgagctatggaaccagcatcaggagcaccagcaccatcaccacgcgatgcatcatccacatgcgcgtccact

SEQ ID NO: 4195 - DNA, 1288 bp, Glycine max
acggcttctgtcttcggagatgttgattgtgaggtgattttggtgaaccatgtggttgatcttgagctcaatcatcttgagaggaaggcgtgtagtttggtcgaggagtgttgtgtttctgaactgggactggttttgagtggcttgcttcagaagcttgcagatgctgttgttaatagaatgggtggaccggttgttaatgctgagaaacttacaaagaggtgggctatgaggagtcgtgagttacgggattctatgcagaccattgttcttccccttggctgtcttgatgtcggactttcacgtcaccgagccctactttttaaggtaagatttgcctcaatttattgatttaagagatttgcataggaggttcaaatttgaacaattgagacttaagaagactaactgcttttgtgcaatttttaatcatcatccaattgtatgtggaaaggcctttttttccatctttgttgtggacttgtttggcccatgttatttgttctgtttgacatgtgttgtcattaaaattgatggtatgattacatctttttgatgcttatcatctgttttaacagaaaaaaaatacattttattaaacaattgagcaagactaatatgaacttcttttatctctctagcagaaagcatttagttatatgttaccttcaatttcaaagttggtcaggctcatgcaatttatttgatttcaactaaagctaacttcagtcttctggtgcttaggtacttgctgataggattaacgttccctgcaagctggtaaaagggagctattatactggaactgatgatggggctgtgaatttgattaaagcagatgatggaaggtatttatcttatggtagaatgatatttccctttttattgttgctttaggtagtttaattcaatggacacttttagtcagcttatgatgtaattgaagacagttggtatatatgttctattgagttagaaactctatattgaacatttacacttcatcatcgtagtggtccagacttcagaggcatttcaccctttccatttggtacttctgctgctttgtaaaactctgcgtctcctatgtgatgaggaagctggtccacctttgtgtaattaacaagtatataacattgttaaattaaccaatgaaccataggatattgcgatgactgtgatttaggttgtaagggaatggtttgatattgcagtgactgtgatttaggttgtacgggaatgattttttaatttgttgcagactggtgatagatcattggattacatt

SEQ ID NO: 4196 - DNA, 1254 bp, Glycine max
agacttgccatgcctgcagagataggtatgatagacatggtttgattgaccactgtatgaggtatatttagtcccccattttgaggagtatatgctgaactgccattttgagagggttcatctgtaattcaatagaaaaaagtacatttcagctgaagcacacaaacataatgggtcaacatatggaactacacaagaaagttagaaaatatattgaaacagaagaaagtaagcattccaaaccttcaaaagaatcctgccggccccctgattttaattgagagtcctgtgaaaaaacacaaataaatacagatattgtaataataattacctaatacttaaagagcaaaaggcatgcataatttatttagggcatcattcaaaagatagtcaattgagtgcccaacaaacatgagcagcagccagcatgagctatgtagcccagatccatgtcatattcttaaacataattgacatctataaattatgtatacagatagacatcttgaaataaaaacattgaacatccaatagtactttatgctgttttgcaacaaaaatttgtactaagccttgtagtactcttgtttaataacaaaaataacctgaacccttttaataatttcctccaatatccttcttggtccccactctccaactctacctatggtctcatagtcagtcccaagccttagtgaaggaggaggattgtgttaagctctcaaatagtcaatgtaaaacttattgaaaccccaaacatggaacctcacaaaagattctgtgtactgatgttgggtattacctggaagtaaagtgttgtgtcactcaagtacaatgttaaatgagctagagttgctgcatcagcgcttgaatgtagtattaaactaaatgagcaaggatcctcacattttttttctggatggaagtgagtaaagcagttagtccaaaagtgcctaattaggtttggtatctagaataagggtattgtgacaggtaagtcttgggaggggggaataccatgatttagagaaggatttccatcatgtgtcttcaagaaactaaatgggttggagaaaaaactaaaaaactagacactacaagattgaaattttggtacacacgaaatagaggatcagaaggagagtgtggtggggtattattcactacttatatttcattttcaaaaaataaacaataatttcaaaagttatagactgcttttgcccccataaagtcatctatctatattaggta

SEQ ID NO: 4197 - DNA, 1006 bp, Glycine max
agccatgtcacactcctgatcgctgcctgcatataaattgttttccaactcagtcaatggccaaaaacacactcatccacaactacacacatgccttgataacatatatgtttttttttatcttaatcctctagttcattaagaatcttctaattaatctgaaatttgatcaagatgaataaaatttagccaaaaattattttcgtcaagaattaaactcagtattacccaaacaattcaatcttaaagtttagagtttggcttttccttcgtctcttatccctgcaccatatgtgacaagtgacaacaataaatcagtttgattctagtgtgaagaaagaaaaatagtttatgtacttcttaatctgtaacagcaccagtctttcatcttgtttttatcttttctgttttacccttttctcttgatacacactttcttttctttatccctgatccccatgatagaaacattgtatgaaatgaacaattcacataccaaagctgcatccccaggcttgattgcaggttcaacacagtctcgtccatatctgttttcacaaaatttaagatttatctgtaagtcgctactgtaaaaaaaaaaaagtaattaatgagatacgcagaagctaaacaaggatgccatagaaaaatcaaataaccacctagattcagaaaaagggttgaaaaatgaaatcttataattcaaaggctatcttctagcttcatccagttaatgtacatcgaacacactattactcacgttatttgtcttttgccattgatcacctctagacgataaaaactgcaccctttgctaaagggaaaaggttttcccttccattctgcatccattaatttccaaatgttaattaataatacgcttttttaatctgaaagcgctttaaaaagtaatgaagaaataaagaacaatagaatttgcaatgcacccaaatgccatatcaccccgacagatgaggagtcctcagtagacaaatcatcaataaca

SEQ ID NO: 4198 - DNA, 935 bp, Glycine max
tgttattgatgatttgtctactgaggactcctcatctgttggggtgatatggcatttaggtgcattacaaattctgttgttctttatttcttcattactttttaaagtgctttcagattaaaaaagcgtattattaattaacatttggaaatggatgcagaatggaagggaaaaccttttccctttagcaaagggtgcagtttttatcgtctagaggtgatcaatggcaaaaggcaaataacgtgagtaatagtgtgttggatgcttgtttagctaatgcttatctcattacttttctctttttacagtagaaacttacagataaatcttaaattttgtgagaacagatatgggcgcgactgtgttgaacctgcaatcaagcctggggatgcgactttggtatgtgaattgttcatttcatacaatgtttctactttctatcatggggattagggataaagaaaagaaagtgtgtataaagataatagggaaaaaccgaaaagtaaaaaacaagatgaaagactagtgctgctacagattaagaagtacatgacttttttctctctttcttcacactagaatcaaattgatttattcttgtcacatgtggtgcagggataagagacgaaggaaaagccaaactctaaaaaaaatcatttaactaccaaaagttaataatctagcaggagccagattaattgctcaatatcaatccaaatcttgtctcaaaacctttgcttgctcttaattataaaccaaaattatgtactgtagtctgtaggcatttagtcttaaatttcccatttagtcttggtgtgtagttattggataagagcaaggaaatactgatggtgaataaaaacatatatgttgtcaaggcatgtgcgtaggtgtggatgagtgtgtttttggccattgactgagttgaattttct

SEQ ID NO: 4199 - DNA, 990 bp, Glycine max
tcaaagccaatacccgaattaaacaagctacatagtatttataattggcaatgatagctagagaaagaagtaagatcaggtggtctttcagtacaacccaagttcaagcaaaacttgttatttgtaccaatatgcttttcaatgccatgattggagaaagaaggcatgaattgatttcttgtacactcttcttaaaaccaacctggaaatacttgctgagccccattcgctccaaagcctctaacatatttcttctatcaagacttgaaaccacagcacaggggatgcgagctgtataaactgcttccaaccagtcattgaggccatccattggtttttcaagctagagacaaagttacatgctagaaatgtcaggttttactcttctggacccttgacaatagccatcagaataaatcaagacaacaacttactctgacaagattatcataatatatctgagaaaaccttaactttagcctattcagctcattttccgccttatctgagagaaaaaactgcaaattaaaaaaggataatcagcaaagaaaaatgttcagagcaacattttagacttctaatgatgatgttatctttaaggaatcatgtcttcataattcaatgcccatgtaaaaccaacaaaccaaaagaaaatggcaaactcaccttatgcaacacataatcagcacctgcataaaacagtaatttgtgcatatcaccttcttccggaatatcctttcctgcatatgatatcatagttatcaatattggatggtagcatgtagtggccaatcacaaaatggagggatagttcatagaaggatgactgttattctgagtttttttaagtttaattactcatttgatccttatacctacacaatctttacattttagttcctatgcctagaaactacttgcctacacatacactttttaacgtgtattagtcctacacctgctttttaatctattttagtcctagggatt

SEQ ID NO: 4200 - DNA, 1069 bp, Glycine max
taatccaaaatagtttgaatgagctaatgatttttctttcagaaagccccaattttaaataaatgggttttgcagagaaatctactaacaaattggcaactccttaaaataacaaacttaacataaaaatttactctacagactcagtttccattaatcatgaaaagtgcaagttcagaatcttaatattaaactacaactacaaacaatagaaagaacacaataattcagctatgagccacaaaattagccaagacatacctaagcacaccttcaacacactcatcaatgaaggtaaatgatcgtgtttgcaatccatctccccacatctcaaatctatcagtggaagtgattactttacgacaaaaagcagcaggagccttctcccttccacctgtatgacaaaacaacaaaacacaaacttattaaatccgaaaggttaccaaaatataaaatgactaccaatttacccatttggtaaagtcaaaactataaaagctttcaattcagtgaaaaacatgcctttccatgtcccaaaaggaccgtatatgttgtggaacctcccaatgcggcactcaattccaaaatccttgttatagtgcttgcataattcctctgttgcaagtttctctagcccatatgcatcttgaggctaaaaaaagtcacaaaattaaacaaattaatcccaatcccaatgtgaaaatcaagaaccaacataaattgaacaattcaaaagatcaccaactaacctcagctggccatgcatcggactccttcaagctcacattagtttccaactgtttaaattcagggtagatacaagcactagaggcataaaaaaacctggaaaaatatttttcagaacgcataaaacacatcatcatctaatcaaaacagacaccgcatcataaatgtttggtccaaaaacaaataattgaaatgatgtgcatgatggctaacctcttaatgccgttaatcctggcagcctcaatcatgttgaagctaatcattgtgttgttgtacataatgacagagtggttagactgaataaaacccatcccacccatgt

SEQ ID NO: 4201 - DNA, 1275 bp, Glycine max
ttgcatgcctgcagttgctgaggtgttctctcgcattgacccaaatttgatctgatgtatgccaagagggcctttgttcactggtatgttggtgagggtatggaagaaggagagttctctgaagctcgtgaggatcttgctgctcttgagaaggactatgaggaggttggggctgaaggagcggaagatgatgaggaaggagaggactattcataaatgaaggttttattatcaatgtaattgtttcgagtaaaaagggtatatgcttcgttacattaccctgaaccagtattgttcgttcctttttgtttttactcctgtgtgatatagttctccattattcaaactgtgaagtgatatcatcattatgcttctattttggtggtttaggacctgttgtttgcgacctctgtcatgttttcagaattgtccatgtcaaaagttgatttcttatgtttatatgctcgcaatttttaccagattttcgttttgaatatctctttttgaaccgtgcaaaacgtacccctcgtatgttttttgcaagtcgtttcattctgggaatggatgtgatttatttgcgatttttgtgtttaagtttattattatcagtgtgtttgaaccagaacaacactcacaatgaacttgaaacgcctgaattgggaagtacgaagctgcgtttagtttggcctagtgaacaggaaaattaacttgacttggaaagaaaagaattggtaataagctgtctgagcttagtgaaagtggataagtagtaaaacactgttcggtgttgggaactaaagagcttagcgtatgattttttacttttaactgtctcttttctatttttttcctgtaaacatttttccatttctattatatttttcacgtatttttatttattcatttattccatccgacagtaattctctcaatgctaccaaaacgtgcattagtgttgtttgtttggcatttttcgtttgaaacatccctcaaatgtttttttttttttttttatcagaaccgtaaaatcgcaaaaccatgttgactttagtagtcgcaactttgattgcacatttgcaccaagtttcattacaaatttggttgagataaatatgaattactattcactcaattaaaacaaatcaagatcatccaaaatcaaatttgttaaagttcagttggcatcattagtgatacaaccacaaagcccgattccacggcataaaaattcgagagagaattacgcaggtgactctagaggaacccgggtttgag

SEQ ID NO: 4202 - DNA, 1185 bp, Glycine max
aaattatgcatttaatttggtttttatgatatgggaaacttttgttagaataacactttagttcccatcaatcatattttggtctttccaatggataatactataatgtagctctgaagcttaattaattaagctacttgttttattgtatgaataaactttcacgcaaatatttttaaaagaagaaaataagaaggtaaaactaaggtttctataaactaaaattgtcttgtgcataagttaaaatttttgttaaatttaatttagctcatgaaaaaaattattttatttttattttttattttcttctcctattagtgtttaccggaaagtttatccaaacaagtcttgctaggtgaaaatggtggacaaatttttaacacattgaattgctttcttattattttcctgctaggtggtcaagtattgcaaagcacttacccatgcgaactgataacgaaatcaagaactattggaactcatatctgaaaaagcagttcgaaaagaatgctgtggatccctcaagttcaaaaccaaatagcactgatagttcctcagaatcgaaatctaatgacacgtgcatggttccatcagagaaaactgattgccatgaaccaaacaccagccaatctcatcagcacaacttatcaaggtcaatctcatcatcaactcatcttcttaacaaagttgctagtaaaattctggcatcagggtacctagaactaatcaaatcatgccaacctgttgttgctgggaacagcaaaagtgaaagtgtggttaaaactggtattgggttagaaagtgacaatattagagacccccttgagcctaatttgacctcaccaagtcattctataacttctgctaagttactgaacaagatggctacttccctccctcataaagttcatggccttgaagctgcaaaagctgtgttctcaaaactgatggaaaacagtgaaaaaggtgccactgctagtgatgatagctttgttggaggttgtttaaatgctttaagcccttttgaggataaaccacacataacaaaaacaattgactccccttctggtcctacactaatgttcaaccatgttaccacaccctcatgcttttcagaagataatgaagataactggcaatgcgtttcatctaactatgtttccttcaaaatttgtgctgcgaatg

SEQ ID NO: 4203 - DNA, 1176 bp, Glycine max
ggtaaaaccgttaaagataaagttcagctttgatgtaaatcatcaaaaatcaaaatcactaacatgtcaaaaaaatataaacaaactttgatgtaaaccaaataaccaggataacccagtggacaaatgcaaaataaccaacgtcatgttcttgtacgaatatatggcttgagataatgttaaattataaatgtcaaatccgtaatccataaaacatcgtgataaaaatattctgacttcttcaagttttatttacataaattctatttcttattataatactatgactgactagagctagttcatttcaggaatgtagttcaaattcaattatcttggccgtaattaagcaacatacaacatacaacatacagtacacgaaatcaagaaacacggttttttaaaattctacaacactggaagaagctcacaagaaagagtacgaagaactagcgcaccacattaagttatgcaacaacacaatcatatcatagactaatgggacaagttatacttgccaggaaagtagttgatgtcgatgacgtaaaacacatccttggttccatattctcgaatcatatctatgttgaacaagtggagtccctagagacaatttagttttagtatatcatctgaaaatgaagaatgactagaaatggaaaaaaaataagaaatgacaacaataccaatctatgacggagctcccttgcaagcctctccaataaaggtcttggtggatgttctgtaacaaaagtgtcacagtagaaatcagccactagttccaggctttaacaccaaagcaattagatgcatttagtaactcaaacaatcaccaaactacattaaaggcctcttgaaagatggaggggaaagaggtagtggttgcagcacaatgggattcactctgtaatgagtcaatatacacgatttaatggtctcaaccattcagtaggcctttataaagctttagaagggacattcatatcaagtgggacgtaaaagatataacaatagtcgataactaagaacaccacaccattggcatatccaaatattggaaaaatgaaggagaaaaatgaaaggtaatagaattgcttttaaaaaaatgtttcactttttgtgatggtgggcgaagagtagtctcaccagcgatattaggatctagatcagcatcat

SEQ ID NO: 4204 - DNA, 1151 bp, Glycine max
ttgcatgcctgcagctgctctttttggatcaaaaaaaattgtggaactatctggtcttagataccatcttttcattaacccattgtcaaggtcacctttggttgcaatgccaaagagaatagatccaacaaatgcaattagaaataaaacacaaaacaagaagtatataatcttatccatcttcttctcaattttgcttctttttgaagggggatcagtggagttttggataacctttgtgtcatgaccagtaaagatgactgctccaaacacatagtctgtattacgaagcttagagtctctcagaagaagttgttgggcagaaagaggatatttttgctctccaaactccatgctcccaacaaatgaatacaaatttgcatttgggtcttcacatttgatgacggctctataatcatggaatttgaagtcctcctgtaaggaagaagttacatccagcccttgttttatcttcaagtttgtctcaccatccaagttcatggtctcaacatagcaaactgcatcctcataactggaggaaatcagtaggaggtcagcagggaagaattcatccttcattatctttactatattccctactctcagattcttccattcagtatatttgaaaatgccatcaccttcatgcaatttaactcttctattgttcacctcgatgtcctgtaaaagtattccgttagctaaaatatataccctgaattgacagcttgccttagacacctatccttttcttgctccccccaaccattagcttttatttctttctcaataagcttagatgatagaactgttgatccattatttcaattccataaaggcatttcattacacagggaaaagaatgaaaatctaaccaaaagcacacaaaacttcaaatataggaaatattgtagtagaattaagataaatagatactattttggaattttaagtctgaccatactgtcaatatagcaaactattaatactcttcaattccagcaagaaagtaatctatctaggaatctgagagattctttcagcaaagtctggaatccgtgagcaaacagcttatcagtggcacttcatcctttttcaaacaactcatagtaatgatctaaacacaaaaactagaatcttcaatgaacagt

SEQ ID NO: 4205 - DNA, 1318 bp, Glycine max
ttgcatgcctgcagttatgactacaagagggaatatcagttggggcttgagaccactatccttgttaagaattatactgtaagttgatatcctggatttcttgaaatctttatgtgactagttccgtgtaaataattattgatttagttggcaattctggttaaaatggcttgcctgaagatagagggacaggagactcatgttttgctgttcctttaatctgttctttgatgtatttcttttcatatgcttttcaagactttctgtaactacattcatatttcttgtgccataacgcatgcatgtaatatataggatttattattttattactattgttgttgtccactcactagtagtgcatttggtttaaaggatggaaggagagggttcccttgtttggtttggtccaagagaagtggaggggagggaaaatatgagtaatatattgttaacccttataagcattagtgaaggggatggggggtaaaataaaatcttatcataattcagtcagcatagtaaaaaaattataaaccacttcccctccccttcaaatccccctaatattggaagggaggaaaaaatagaagaggagagatatggcctcctcattccccgttcctcgcttcttaatttctgaactaaacgaggtaggatttaaaaaatctctcccctcccttccaaatttcacgtatgcataaggtaattatcattaatattgttagaatatatgaaaaatatctaatattattcttttctcagaatcttagattatcctttaggattaatttccctttatcctcattatctcttagaattggttaccatattttcttatctcattatttgtttcctacatagttaggatcatgattagtacaattaagggttagtgctctaggttttatgaccacatcatcacatcatatcaactcaatatcaatctcataatagtctttccttttcttccctttatacatattgatttacccctctgaatcagcttccagatggaagggtcattaaagtaggcactgaaaggttccaggctcccgaggctcttttcactccggtaggtatttggtgcccatttgacttatgttttctattgttaaagtcacatatagatatattctttattttctgtctctttaattgacaactcttcaaagttcaaaattcaaatcctatcagaatcattatggcaattttttttaaacatagctaaagtattttcatgatgtgcttgtgcaattctagcaagtgtataagtgtatattagagtatgataaggagctgcaaggccatgcaagct

SEQ ID NO: 4206 - DNA, 914 bp, Glycine max
  misc_feature (794)..(794): n is a, c, g, or t
  misc_feature (853)..(853): n is a, c, g, or t
atgatgtcatcctcattgaaacccgagggaaaagaatattagaaaggcctgtgaatctcttgtagaccacatgatggaaaaaatacggagttcttttcctgcttatgaaggaagtggcattcatttaaatcctcaagcagaaacagcaaaattggggtttgactttgatgggcaaattcctgatgaggtcagaactgttattataaattgcctaaagagtcctccccaattgcttcaggcaattactgcatacactttgcggctgaaaagtctaatctccagagaaatagagaaaattgatgttagagccgatgcagagaccttgaggtatcatttatacatggtttttgtttttcatattctgttggtgctctcattgatgcctctgtgaccataatatttgaattttggaccttctgtcattaatcattgttactataactttccaaaaaaaaaagtctgtcccaaatgctatattggccaagcatgccaaagttgcttacaatgatttagttcccctgccaaccaggaaaaagtgtacgaagtagctgtatgaattttcttttgtgtatggtttttctgttagattgtccagaatcatgttgaaatcccaaccaacgtgattttagataaatgcccatatgttttggttccacgtcgaggaattgattttgagttgaaacaactttagatgacttttgtattgaataaaattttttatactcagctttactactaacttgcttttagataaaaaaaatccatttataattcttatcacttcaaaatcaatntgcaaaatcaattttgccaatgcttacccaaacttacattttatggagggtctgttagntttggtcttattggcaggatattacgtatgccattactgttataatcaaacttgcattttt

SEQ ID NO: 4207 - DNA, 1293 bp, Glycine max
ggagatgtttcatctgatggcaccacttaccttgttgctggtgccattgctgtggctctcattggaacagccttccccatcttcttctcccgcaaagacacgtaaattccatcatcttttctctcccaacaattaacattgtaatacttgatggctttaatatatagtgtacacactttcatgcaatactttaattttcctcaagtaaaaatataattaaacaattattgatgtaatgaaaaagattgtatcaaccatatctgaaagaacataattaactgtatcaatcacttctataggtgtgtttaatctcatttttgtttggggtgtgttaggcaacccatttctcattgatgctgcaattagtgtagacttaagaatttctattaagaaactattttgagttgacgtttttttatcttgggaacttgaagtgttctcttttttcaaaaagcattatttttcccagtgttctctttatgtaattcttgtttaggacggttttagagttcgaatttgaatgtatacataaaatatgtgtttgttggtgaggatgatttgttaatgatacttatgaatatgaatgtggcagatgccctgaatgtgatggagcagggtttgtgcgtaaggctgatgtgacattgagggccaatgcagcacgaaaggatcaaacccaaatcgtttgtgctcgttgcaatggtttgggcaaactaaaccaaattgacaaatagacaacattatgcttcctacttttcccctttctttcttttcttattatgtaattatataaggataatatattattaatatcccctcctcgtgtttcttcctatgaaatgaacattataatatgccatgataggagagaaagacacaaatttaacttcttcagaatactaccattttgcattatgtatctgatttgtgtttttctctcccgtatcatgataacccgatgctcttaatctcttgtctaattgtgtgcatatgttgtatgtacttgaagtacacttctcaataagaaagcccaataaatacgatatatgttcgtcctttcttcacatttctattttcgactgaatctgattaaaggggaaaattcaatctttataaacagaaaattcaccctacaaaagtaacaaaacccttaatacgtatttggactgggttattataatatatttgtataaaaaaactgtttatattttatatttccgcttttttttttttttggtaaagttcgagaaaacaatggctaagaccaactgttgttgatcattctattcagagcct

SEQ ID NO: 4208 - DNA, 1123 bp, Glycine max
atgatctaataacaaccagataagggtggtccaacaacaatagctaggatagactagactttgttatcaccttgaaatttgagttaggtctaacttaattcaattagttcaaaagtttttttttatttttttatcggcagttagttcaaaaaggcaagggttgaccatcacttgtatacactgttttggtcatataacttgacggttgcggtttggtcccaaaccttgacattgggggaaaaattgcggacagatgtggctgatgtcaaaaaacctttacgctgtggctgcaattgcggttgctgaccacaatttaaaacaatgtaactggttaatgtaggatttccaacacataggaattgatttgttttgtgattgttgcagggaaaagatgggaagattgcacaaaggatgggtccccagagattcctttcggctacatttgcggacttgcctgctccagaatggcaatgggagcagatgccgtcggctccagtgcctcggctagatgggtactctatacagattaagaatacgttttatgtgtttgcaggatatgcccatcttgaccatgtgagtgtgttgcgtttcctcctatttagtgacctcatgtacagggattttaaacactaaaatggcataatttcaggactaaactaatgtaatttgaaggactaatgctcattcaagttttaacatgttttttatctatgaaagtattacaatttcttttagttcctaaaaagattatttattttcagttattatatttaataaaatggtgataaatgagcttggtgtttgtttgtttcttcaggtgcactcgcatattgatgtgttcgatttcagcatcaacaaatgggtagatcagattaaaatgccaaatgaaatggctcattcacatttgggcatagcatctgatggcaggtatatatacattgtctcaggacaatatggtacccaatgcagtgggcctactaccgcttccttttcgctagacactgcaacaaagaaatggaaacctttgccaccattgccagcccccaggtacaccatgaacatatgcatcagtactgcacttactcatttgctgtttgtcaatgtgtgttgcatgttatttttt

SEQ ID NO: 4209 - DNA, 1077 bp, Glycine max
taaacatgcatgttatatccatcaaatgaattttttaatataccaaaaaaatgttagtgaaaataaaataacattactaaaaagaaaagaaaagattatatatatttttagaccatgaaaaaatgaatatattgaattagagttagagatattcgaaatcaagcaaaagaaaaatactccgacgatagaataaatcttcaagacttgggtatatttctttttcttggaagcagagtctaatgacaaagaaaatacaaaatgactaacggagtgaagtcagttgctgaattaacatacaacggaagagatagaagctggggcaatataaaaaaattaaaaataataaataaataaattggaaaataaaaatgtggccactttatctcttctttcatgtttgaccaaaaagaagacatatcttttttccatatggtttaacattttttttttctcacactagcatattaataagttgctcgatctgttttttagacacgttaaaaaagtctcattttttttaaaaatcatctgtatacaattattagcggcaaagctagcatatatatacgaactcttaggggcgaaaagtggtttacaaaaatatgagccttaagtgctaaatgaaaaatcaaaatgaaattattcctttaaaacaaataatctgataatcacattttcacattagctggaccacaatatcacaacttgctcgcaaaagagacgctgcaaagctcaaagtcttcgtctccgcgtacacagtgcactaagttacaaaatatcatctcagtatgatatagataaaaagaatttataaaaaaaaatctgataaccgacacctgttaatcatgactatagaacttataaatagagaatcctgttaattttaaaattttattgaaattatatggttaagatattatcataaacagtgtccgtgtcattgtttggctaagtacatttattggctatataacgttgcagaacatcaagttttgcactcacaacaaaccaaaaaacagagctagctagcaagactaaaatggcagaaactgcaggcatgcaagttggcgcaagtaa

SEQ ID NO: 4210 - DNA, 1216 bp, Glycine max
tgtaggtttgtgattttttgactatactgtttttaacatggataaaacttagattggtgttgttctccgatcagatttagagttttacttcggtaatatgcgaaacaaaggaaaccattaaatgccattgcgtattcctgagttaaaactttaaatcttgatactatatctaagttttttccttttaatgttggcccttggacatgttgtgacttgaacttaatttatggggatggatgactaatctcttaggatagtctcttattggtgatgatatctacacaacaattttaatttggtgatgggaacataataaattatctattattagttaactccctattcctcctgtccttgccttggtaagtgtcttgctgttttgcccatttggtgcagaaagtcttggttagatttatgtcctctgtggataaactttttttataaacacttacgggaaaagaaaattagaaagtaaaataaattaagcttcttctatgagctaaaatcaacttacacacttcaacttttggagaaattagatgagaaacttttataaaaattaaatgcataagttgattttagctcatgagagaagctcaattcattttaacttcctaatttcttttccaattaagtgcttgtttatccaaacagaatcttagtcttctgatgtgaagtcctagtttgcatattttagttgtcacagttattgacttgagcaattcatgcatgagcaaggtatctatagacacaccaaatcaaaagctttagaaaatataaaaataactttcaacaatattcttttttattgttatcttcatacatccttagcttttgattggtcgtgcctataggtactttgcttacatatataataagtgctcaacctgatcccttaaactgagacttatctgtctttgatgaatttaataacatacgtgcagagatattgtgcctgagtactcaacaaaagtaatggcacttgcttctactttgtttgagttactgtcagaggctcttggccttgatcgctttcaccttaaagaaatgggttgtgatgaagggcttcttcatctgtgtcactattacccagcatgccctgagccagaattaactatgggcactagcaggcacacagacggtaacttcatgacaatacttttgcaagaccaaatgggtggccttcaaattcttcatgaaaatcaatggattgatg

SEQ ID NO: 4211 - DNA, 950 bp, Glycine max
ttgcatgcctgcagcacaagaagcttttgtgttattgtctctcacagagagcccccttcattgcctgctgttaaagtctgatcattagatccctgcactgaaccatcctctatattacttggagcagaattgctattgcttctattattgtctctggtctccaggcgttccatcatgcgtgacacagttgcaatccctgcattaacttctcgcctaacttcagatccaaggtcagacatagtgttgttccgagagaaccatctctccttccaccctcttgtgctcttggaaattgattccttgtatctgaaagacaagaaaactagaagttcaaattacaatgggagaactcctcaattgtactgtaccacacccacatgtgacaaaggatagtccactaccttgttgacacagcattcagtttagatttcagagattctgaaaatgattgtaattctgatggtcctgctctgtcttgactacttggagatgactgattaggagatctcctgtatgatgtttcagacataacagttgagaacttctaaagcttgaatactaggcaatcatgaatttgaaaacattaatatgatccagaaattcaaaaaccgaaaaatgaagattacctattgttgtaggatgatccctgatgatctgtagcaagagcagtagatccagatcctgaagcagacacctgttctgcttgaacaggcggaactaaagtcagctgcgatgattcttctccagttgcaggagttggagacagattggcaacatcaattgtaggaattggttcatcatcccccctctgagatggagaggaagaagcaggagccatgggaggtgaattaggattagttgaaaaaaccaaaaaatgtgggcgaccttgagctgatgatctgtttctctggccttctcttctagcaatgtggcgtgctcttcccatcgct

SEQ ID NO: 4212 - DNA, 1052 bp, Glycine max
aagttcactcttaactaatgttttttcactgtattccctagctatatttcagactggtgtgtgacagtctttttttgttcatagatattgcggaagcttgaagaacgtggggctgacctagaccgcttgtatgagatggaggaaaaagacattggggcattaattcgttatgcgcctggaggaagggtatgcaacttttactagaatgattttcgaagatttccatcagaggttggttcggatgttgaagaaatgctgattaatgttttcttatcccttcccctttttagttggtcaagcaacacctagggtattttccatcacttcagttatcagcaactgtgagtccaattaccagaactgtgttgaaggtatttcatgatgaagatttttttttccagactgctcagttgacattttttcattgatttcatcacatcaaaaagccttgatacctaattctgcatcaccactcattattttcaggttgatctggtcattacgcctgttttcatttggaaagatcgttttcatggtactgctcaacgttggtggattttggtagaggtgaataaattttcatgtgatgattggtcacattgtaaattccttggtttttgttaaaaactctgatctcttgttataaaaggagaaatttatcaagatgaagagaaagactttcaaagagaaaggaggatgaggaatcctcctaaacaaaggaacaaaacagaaaacaactaggaagaaagagataatcagagaaacaaatcttcccagttgctcgatataactttcagtgaaaatgctaaagaaaccccctttaaagcaaatagatactgagcacctgatcttataccaaatcatgtgacgtgctaaagaaacctcctttaaaaatactagaacagcttgtagcatatgtagcagatttatacaaaaaattagcttctttacttctgtcaaaaccttgaaaaccaatcatcgataattgtttttgagacttaggacacacccaacattaactgaaaatgctgaataagtaatgccagggaggg

SEQ ID NO: 4213 - DNA, 1152 bp, Glycine max
actggggacttaacaaagtctgagagagcagttgatgggatatttggatttggacaacaaggcatgtctgtcatttcgcaactctcgtcgcaaggaatagcaccaagagtgttctcccattgcctgaaaggagataatagtggtggtggtgtattggttcttggtgaaattgtggagccaaacatagtttatagtccacttgttccatcacagtacgttcatttgttagagtatatgctacgtttcaatttctttatatcaattatttatttgtggttttgttgtgtgctatatacatgctgtttcctcggctgaaatctttggtaaatgtagtgctgcttaatggagttctgttgatatttatcctttagattatctctttgacatgaagatcaaaatttttggtcaagtgttgagttctgttgatcttttgtatgagatggaaaaagcatgttgataagttgatggtgcttcttttcttagttcctgggaacctaataagacaaataaataaaatcaatttataatatctagcacaccggttaggaatatgattgtgaaactgttcacctgaagattatatgggactttgatggttttgtcactgtaccaattaacatctatagaactatgggatgaatgcagtagtgttttcaatatttgcaatgtacttgggtgcctgctcttggaaaggtgccttgtgtaaggtcaaagcattttcaatatctgcaatgtactttttgtttaagcttttgatactcttaaattgatttctatttgtataaagtgtgatttttacctcaagtcagcaaaacttagtttattgatcttaaccttccttccactgcttaataggtgtcctttggtacatgtagtgcttttatttttttcactaggaatttatagataaattcaggcacaaatttggattttagaactctatcatggttactgatttttatttttaccaaaaatttgcattcattattgcttacttacatattatatagaagttgaataagaattttaaagtccaaatatattactaaacatatttgtattgggaatggctttggaagaatattctttgtgaaaaattgttagactaattgcttccttgggaaatatttcaggcctcattacaatttaaat

SEQ ID NO: 4214 - DNA, 968 bp, Glycine max
agcagcatttgtcgcctcccatttcaccatgtactttgtttctttttattattactaatatcagacattgtacctgaagcatggcccttcccccctaaaaatatcaccaaccactgactcacacaccaacactccaaaccgacgaccataacacaaactaacacctagaaaattaacaactaaacaacccatcttttagtcagaaaccataccaccaaatccaacatgcaaaacctcaatttcctctgcctaaccatcatttccatttctctgatccacaactacagcatcctagtccaagccctgacctcaccctcagacattgcagcactcaaagccttcaaggcctcaatcaaaccctcctccatcacacaatggtcatgcctcgcctcatggaactttacaaccgacccatgctcactccctcgccgcacctccttcatttgcggcctcacctgcacccaagactccacaagaataaaccaaatcactctcgacccagcagggtactcaggcacactcaccccactaatctctcaactcacacaactcaccacactagacctcgctgaaaacaacttgttcggcccaatcccctcttcaatctcttcactctccaacctccaaaccttaaccctccgatccaattccttctcgggcacaatcccttcctccataaccaccttcaaatcactccaatctcttgacctcgcacacaattccctctctgggtatctccccaactcaatgaactccctcaccacactccgcagactcgatctcagcttcaacagactaaccggttcaatcccgaagctcccacccaacttgctcgaactcgcgatcaaggccaattctctatctgggtctctccaaaaacaaagctttgaagggatgaagcaattggaagtggtggagctcagcgagaacgcgctcaccggaaccgtcgagtcgtggttcttcctttt

SEQ ID NO: 4215 - DNA, 1213 bp, Glycine max
tgctgatgtagtatttgccatggcggtggcggctggcggcagagggtggttgtgattgccttcgtagcttgttatcaacactgttttgtcatctgcacttctttgaacctgtgttgaatacatgcataggactatatatttttaccaatgtacacacaaaggaatataacatgtggcttcttttgatttcttaaaaattatgatattggatttgagaaatatttttattttacatttggtttgaataatgatatattaaaggcatgtaattagaataaagtatatatagttttttatgcttagaataaagttcagttacttacctgtttgcggactgggcatcctacagccatagtgcagcgatagtaagcacgagggcaagggttacccttggccattttttgtccatatttcctccactgacatccatcgctaatctgaaagggccacagcacaaaacgttaattgttcattcaattaatttctacatgtatgcatccatttgctacccgggcattaaactagttgaattaagaaaactgcatgttatactttcattttgagacatattaatactattataatgtttttttaaactattgtattcaccccttccaaaataatagttattttggattgttttaaaaaaaaattaaataaatatatatatgtttataagattgatttgatgataaaaaaaaaatgaatgattataaatttttcaaatcttccctcattaaaaaaattaatgattaacgattaatatttgttaataaaaaatatttaatatcttaaaattaataaaagatatttacagttttttaataaataaaagttcaatatcgaaataaataatatatatattgaaattgtaaaagttgttatttaatcccaacaatgttatattaatgataatttgtgctgatcggttggtaagagtgtgcatgcttttaatttgtgggaataaaaaaaatataaatttttttataataattcgcttaaccaatatatgtttattaattgtttgcactctcaaagtaaaatgtaattagaatttagaattgctggatctttgttaattaattaactagctcaaattgagtatgcaaaattaagtggtacagtgtatataaaatgagatgaatactaattaccatgggagcttctgatctagcacgtacggaaacccggcttttctgagaggaatctatct

SEQ ID NO: 4216 - DNA, 1011 bp, Glycine max
attggtcagagaagctcaattgagcttgctgctttaggtactcataaataaattatcatttataatatatcttacattattagagtttcttataattaaggatatagcacacacatttatcttattttaattttctatgagcaggtcctgctacagttgtttgcgactacatgagctacgtgttcatgtttctatcaattgctacttccaatatggttgctactgcccttgccaagcaggttagtagcagcaaatgtgtgattgtatgttaaataagatacatatgcataatgtcttacaaaaattgatacacgaggcacacctgatctagatcagtgaatattgacaccattgatgtgtgttctttggaatatacagtgagtgagtgaagtgaagttactaggatggtgcttcatgttttgcgattctcttcacaaatcttatgacatgttttatcctatatataacttgcctgtgagggcaacacattattataacaattattagcagtaaggagccagccggattgttggttgatgtatagttaatatctacagcttaaccttcaactttgcagtatttaaatatgtagtgatgcaacgaccactgcttgaatctgtcgttcattagaaacttgagatctacagcttagccttcatgatcttgtagacttaaatctgcatatctaccactgtatgcactttcaggacttatactgctctttcacgggtttgtgtaggacaaagaagaagtacagcatcacatatctgtcttgctttttattgggttatcttgtggcgttgggatgcttttgttctcaaggctatttggtgcatcactaataactggtattcaaaatggagagtgctttaggcatttttgttcttcaacacattttggataacaataattcacttgtactgaaagggtgtcagaacaaatcccataactgttgatttttctatttatgccttttcagctttcactgggccaaagaatgcacacgtagta

SEQ ID NO: 4217 - DNA, 832 bp, Glycine max
cccctacaggtggacagacaggttcagcttttgggcagaatacctccccctttggacagactactacaccttcttttagtcaatcaagcctgttcagttcaccttcttctgggcttgttggaagtattttctcatcaagtgcacctctcacttctaataatctgacaggttttggtcaaacagcggtacgtagtttcatttgaatttgatgtttttcacatacaatctatttttcttttaaatcactatttgtttgagccaagataaattggagtcatatttgagctttatactttacaaacttattaaacattatgcaagtattctataaatattgcatataaatgatgagtagtacagcaactaaaataaagccttatctcattaggaaggttggctatatagatctgtcaactcgattgtgctccattaaaaaataaaattgcagtaaaagggtaaaaccatctctcaactagtggctgtacgaaatatgactatactatttaaacatcaaacaagttatttgaaccctaagcaaatcaaatattgttggtgttagatataaaaccatactggtgtcactacccaacagcttgtgcttttgtgagaattaaaacttaataaggtattgaagtctctatgatcaagattttaggaactcaatctctagttactccattcttctgataaaaattaagtttcagcataattcggcatgtgtggttcaaactttctttctgtagggtatgtgttagatataaaacattccaagtctctctaccttgcagcccaagcatttgggagagtttgttgttggaatttttcatatact

SEQ ID NO: 4218 - DNA, 1079 bp, Glycine max
atttgcaagaaaaccacaggtaaaagattagacacccaacagttgaatatttgtcattgaagcatgtcagaaatatggaaattagcgagtaacacgaactcttgaacacatattgaaatacgtatgtgcaatgatttttgaacacctcaattttttaaacacttctatatcatctgttaatttcttcctatcatgtcataccatttatcatacattcatacttataatttatctttttttatctctcttactaagtgtcaaatagtatttgaggtatctaaaaatcattttagaatgttatcttctcaacaataagttattatatagacttaataatggattctagacaagtttaagggggaaaattataccgagtgcatacggtacttcttgttaaggtagttaatgttgggtgagatgaataatgatcatgaaaggctcatagttttaatttgatgtaactatgtaacaatatggagagtacaaaaatggaggaagtacgttaagcaaaaccaatacccaatacccatattggtctcctctcatgctttttttgtaatgaaaatgggagggggcaagggttttccgcgttcctaattaaccttcctgaagcaaaacaatgtcttagcaaaaatttggagaatagaaagatatgcttggttcaaaattactctcacttttctatacaatctaataatgatatcacggtaagaaacttactgatgcatttgtattctaatcacataactatataccatagcaataaacaaatttaagatgagaaaggactacatactttctttttgacaaatgcaggcaactgatgggtgaagaactttctggtttgggtattaatcagctaaaacatctggaaaatcaactacaaatgagtttgaataacgttcgcaataaaaaggtatcatgattcaaagtcaaagcaaatcaaagctcctctttatactacatgtttggttttcattaatcatttttagtaaaaagaaagtttgtttcctcctctttatttcatgcacgactcttacacaatcatttatttcatctgcaggcatgcaagcttggcg

SEQ ID NO: 4219 - DNA, 1214 bp, Glycine max
ataacaaataacattttttcaaagtaacatttgtccataaaacaagaaaactatgaaatcaaacccaagcaatctccaccgtaagcctaaaagcgacgtcacctaatattggatccagaactcttctgattaaatagcgagagaaagttcctgtcatagaaagaaaggcacagttttaaatatattttttttaaatcaaatttaaaatatagctagtggagacaaatcaaagcatttattctaaaatataactagtggagacacattttaaagatatttttattttaagaatttgttttctcttttaaggttaagaaaaaaggaatttcaaataagtctgtgtaaaggtagaaggtacccactcaagtgaaaaggtaccatctgggaaagccaaaatggaagctgatgaaacttagtccatcatttttaatcttttcttacccccaaactggggtgatatatgatgaaattaataattgctttcttttacttgtttcggtgttactgtcttgtaaagcccaatcggggttgagttttccagcgaatgcaaaggcagaatgctaatgtgacaaaggcgtgtttcactttgaagtggtagatagaggttctgcaagcagagaacgagttgctgatgaatggcttggaggatctctggtgagaaattaccaacgtccgtccaactcattatcaaggaggcaccagagttgtcactttgcatttcaaacctttaaatgaactactggcattgatgggagctgcacctgaatccatagaaatggcatgcaattgcataacgcattaacgcctacccatatatcctaccctttttaacccctgctgctccagttaacatttttaattgaaaataaacaaacttgaagagagggcaagtggcaatagtctatataatggtaaaaacattgtcatgatatacacaaccaatccagaattcgagatatgtcatctaaattaagagcttggttcaaaataactagcagctcaccacaaggttaattacagtctatgacagtgatcataaattccagtgccaaatttcatgtacacgtagtatatcattttgtgcatctcttgccttatacaggcttaaacttcttatggctctatcaacatttgaaaccccgacaagcaataacccacagaattataattaagataaggattcctcctcccaccatcagcttcatttggagatt

SEQ ID NO: 4220 - DNA, 1130 bp, Glycine max
  misc_feature (74)..(74): n is a, c, g, or t
agcttgcatgcctgcagaagaaattagcttgaattagcttagcactttggctgcctataaataaacaacacatngtaatgaaaaattcaagcagaaaatagaatcccttttcttctttctttctttctttgggaggtccctagtccttgaagtctaggattacttgagctgatttttctgctcataacagtgtataaactgttctcattctaagaatgtgaagacagtaaatctaaattatacaactatacatagatgatcaagatgaaaagttaggtagcgatcatttatgaaagtcatgtgtgcatttatcttttcacaataaccaattgctctcaagtctcacctacatattccctatatatataagttgacttcatggaagttgtgcccactagccaggacttgtttgaaaaacaaaggaaatgagacataagttatgaccattggccatgacttgtgtagcaagatattttcaaaagacataaatattgaggcaaaagggaatcctttagtttttgtaaaagtatcttactatatcattactgtatctttcagtcttttagagtatctcagactatctaatttaggtgtggtttccatatttaatgatttattttcttattttattaggattaggagtctagtattagtataaacagatattcatgctttgtattttgtatcacatgaattcaatatcaaaatcagattattcgttgccttagtctctgctttcctcagtctttaaccaatccctgaaattttaacattatattagagcttggtttgccatcctccgtgacctgtctcatcactattctgctattgagtttcttaatttgaattcttttgtttggtatactgtttccaaagtccaaaccacctcagttttcaacaattgaccttcccattgtctctgcacgaaattcgaccactgaaacccaagatttccatccactttctgtttctctcacccccttttccttctcgtttgattgtcagtaaccatttcactgcttgtcagtggactttttcaatcaccaccaccaccaccattatcttctcgatcatcacaagattggtcagccacccaaatgacatggccattgcaatccaatgcacctttg

SEQ ID NO: 4221 - DNA, 980 bp, Glycine max
cggtcacaatgcatcattaacattcgtgatgttcccccaaaatgtaaaggggtgatcaatcctaagtcaaatggtgcttctttgactatcattgaccttgcaggggctgaaagagaaaaaagaacaggaaatcaggttgagtctttttttccatactgttatgaccaaataagcttgattttgggcattgtgcagttttcagttttgggatataatctagatgatctcttaaatgtcatatcttttaccctctgttgtcataatcttgtctatcaattttatttcaaaaggtttcataaagtttgaaatacaagcctttacaaattattagagcgaaattctttagtgtctaataaaaattaaaatatctaataaaaaagtaaatcctattaattttaagaggtttgtgtacaaagttcagataaccgggatgtcatatgttgcttttatctccacctatctcaaccttttttttgtgatgttgtaggggacaagattgcttgaaagcaattttatcaataacacattaatggtgtttggcttatgcttaagagtatgtagcctttgcttcaaactatgaaccgaagttattgtgcttttggtagctagagttttattgatttttacactactgccaacatttggaaattttcaaatatatttttctcttatgcttttaccttccctcatattttatgcatgattttgttgatttcagtcattattggagcaccaaaaaaatcgcaagaagccattgcagaagcacttccaaagttccatggtaatgtttttaataatttaatttgttattgtattttgatagactttagttgtaatctttgttaccatctcttaatggctaatgtcatatcaacaagcataagctaaaagcttattaattttctcagcttaggaatctcttttagacaatgaaatggggaagagttacaacttaacaaatttgactttgtataccgctg

SEQ ID NO: 4222 - DNA, 1145 bp, Glycine max
actttggatcatagaaaatatttccgcttccttcattgcacacaatgctccagtttttctgtgaggaaaaaaaaggagtcctaaatgagcttcaattccaagaaagagagaatggaaatagcattaatgcttatgaaacttgtactagataacatagcatacctattggtggcagcataaacagttccaaaagtaccacggccaagaagtttccctttttgccactggtttttcatgggcatgggttcagtcttagccaagggaggggaaaaggtagaagaagatggggaaagcatgggggccccaggcccagcccaaggaggcaaaggtaaggggtgaacagtgagaagagcattggtttcacgacgtgctatggaggtgtcaagggataacctgggggggatggatagagaagaagaagggccagttgggctttttggatgtggggcagcgaggctttttccgggtgggctttggtggggagaaagaattttatcggtgcgtaatgctgataaatcaaagaaagcgggaggtgggtgggaagtgtcgaatgtgggcatctctggtgctgaccagaactggtttcctttgggtgagacgtaatggtatggaacaaaatcatcgtttttcttaatgcaagttttcggactggcgaaaggactcgttggagcacttcttgcagggaaccagcacccatctccttgactgcttgtctccgcctgctccacacttttcactgcctcttgcctcgcaaaaacactgtacacacaaatccacccaccaatcacccaataaaattataatttcaaaccaacaataaagctttatggcccttgaaataaacatactcttttcaaataaattaactcaaaaccttgtacaagctaccaaatcctcccacaccaatcctaatattcataaatacctctgtattacaaatatatatatatatatatatacattttttttttgtctctcttctaattaatgtagtatcatattacttttttagatctatatttctctcttaatttatttctttgtcgtcttgtacaccaatttttttcctcataattgaccaattggttgaaaggatggagaaataaagtagttatctacaaacctgcagaacatggagctctgtg

SEQ ID NO: 4223 - DNA, 1232 bp, Glycine max
cagcttgcatgcctgcagatgagtatacaatagaggtttatgagtgaaattaaagcagtgcatctgatattattgccatctaattggtggcttgattttgaacagcaacatatcagaatgatttgttatcattcttatgtcaaaaggattaaaaaaaatgatacaaaatttcgtttctgtcaaagctaattacttactatcaacaactttcaaatctatcacctaaccaaaagttgtaccaaatatttataggatgattagagaaattaaacaaataattatatgaatttattactgatctccaatattttgaaaatggttaactatgcatttttccttttgataggtgcatatggattgctttctttacatgtttggacagattatttttcctcatgcctacaattgccaagcaaattaaaatatcatatattcgatcagttttcataggccatagcccataagcctttagcattagaattcctaaatggtattgctttatccagaatctctcaaaacatgttgtgcaccttcaaacttcaattcaacctacaaaactctaataattcaaacagttgcataaaaacattagcatacttcttacaaagttcactatatgggtaaaaatcattgtatgttaatccaaggccataggtcaaattgctaccagctcaagatcgtaaagctaaaagctaaaaacaccggcattcatccaatcgcttcagttattaggggtgactctttgtcaagatgcatggcaggaggtatagcattaccttcaaactttttgatggtgatctcaaaacaactgatccctcagttgctcttggcataagagcgatgttttccacatctgtgcttggaccagcatggttcccacttgtactcacatcttgtgtgatctttgaagcctctgttataatcatctgcaaaccaattgtagctttttaagatgatgacatcacataccctttgttagtacttcgcagtataaattaaaggaaaccctacaatataaaatgtaaggaataaaattgaacattaaaatctgtctccaaaaatataatgaataatactatgaaacatattttgtttcacctttctcaaaagagaaggatcagaaactccctgaacttgtagttcatctacaggagcagcttttccatgtgcaatactttcaactcgaaaagtatggataccatatatagactgcaggcatgcaagctggcgaa

SEQ ID NO: 4224 - DNA, 1070 bp, Glycine max
ttttgggataaactgaaaaaaattcaattaaatcttatcaaagaaaatggtcactaactagaaaatttatattgttacatgcattataaaattaataatactaagaatctcacagatacttttgcatattctgttgtatattctgccccaccctcgtcgtcatgtgacactaattaaacattttagagaattaagactaagcataagttgcattacgatcataaagttgcatgcctcatgcttaggtcaagccactttaatccttacaaacctaatccactgtagaaccattttctctttaattcgaatatatttatagtaaaatcagtgttacatgctgccattcaagtatatatatgagagtaccgtttctgatacttgttcaccctagagaagagaatctaatttgaaacaaaaatgaaggctagtgcagttgagtctagtgaaatttcaaaaggagcaccacccagaaaggggttgattagagggctctcaataatggactttattttgagaattgttgcagccattgccacactcggaagtgcattgggtatgggaacaactaggcaaacacttccattttccacccagtttgtaaaattcagagctgtatttagtgatcttcccacatttgtgtaagtggtcattctttaggttgaattaattttttaactctctaatttatttttagattcaatttggttatctagtttttctcaggtacaatataatcaactaatttttcaaatcgatcttgaaaattaaatgaacaaattaaacctaaaaagatctagaagataaaattaaacaaaaataaataaaagattaaattgatctaaataataaattagaggaaaaaatctaatttaaccacctttttattagagattttggtatatatgccttaaaataatgcttttttattaagaagaaaaagtgtacaatgagagtgtgaaatatgtaattgcaggttttttgtgacctccaattccattgtatgtggctacctagttctttcacttgttctgtcattcttccacatagtaaggagtgctgcaggcatgcaa

SEQ ID NO: 4225 - DNA, 1052 bp, Glycine max
actccttactatgtggaagaatgacagaacaagtgaaagaactaggtagccacatacaatagaattggaggtcacaaaaaacctgcaatttcatatttcacacccgcattgtaaacttttcttcttagtaaaaaaaaatattttacggcatatataccaaaaatctctaacaaaaagaaggttaaattaattttttgtccttaaatctattatttaggttcaatttagtcttttattttattttttttttgtttaatttgatcctttaggcttttttagattcattgtgatcatctaattttagaatagtctaattttaaaaattaaataaccaaattaaacccaaaaaaaactagagaaccaaatttaatctaaaaaaaactaaacaactaaaaaattaatttaacctaaagaatgaccacttacacgaatgtgggaacatcactaaatacagctctgaattttacaaactgggtggaaaatggaagtgtttgcctagttgttcccatacccaatgcacttccgagtgtggcaatggctgcaacaattctcaaaataaagtccattattgagagccctctaatcaacccttttcttgggggtgctccttttgaaatttcaccagactcaactgcaccggccttcatttttgtttcaaattagattctcttctctagggtgaacaagtatcagaaacggtactctcttatatatacttgaatggcagcatgtaacactgattttaatataaatatattcgaaagagaaaaaggttctatagaggattaggtttgtaaagattacagtggcttgacctaagcatgaggcatgcaactttgtgatcgttatgcaacttctgcttagccttaagtctctaaaatgtttaattagtgtcacatgccgggggtgggggagaatatacaacagaatacgcaaaagtatatgtgagattcttagtattattaattttataatgtatgtaacaatataaattttctagttagtgaccattttctttgataagatttaattaattttttcagtttatccca

SEQ ID NO: 4226 - DNA, 1169 bp, Glycine max
aaaaaagtaatcatgtacaatcataaaagccatggttcaaaaccataaagaaattatttcgttttaggaatgaaaaataaaccccatggtttggtcatcactttgaaccatgtggattaaaatagtaatgaagggttgttaacatcttcacatgccatttttttaatcaaattatagggttttataataaaaataataaggccaaacaatgggaaacaaatcaaataatcagaacatttgtgtaaaacagtaaacagaagctagttaaacgcgtactgcatgtctgcaaccattaaaaagtaatcacatacaatcataaaagtaagagttgagtgaaacggtatgatagaaaattcataagcaacacatcccacacacccataggcctagcaagagtccaaacaaaaacaccctaatctatacaggaaagacagctttgaggaactcgagcttgaggaagaaaataagcagctaaatcaactatgacagatctaaatgaagaaaataagatgacacaacattcaacaaacaagattacctcttatccatgttaggccctctttttctcaactagaatacattacttccaatattaacttcaaatgttaatttatacccaactcatactcatccacttgtaattttatgtttatgtttatatagctattaaaaatgggtgtatacatcacatccgtactatatgcatatttccttcacatttactaatgccagaacccacagtatcctgtacattgaactccagcatatcatttcattgtttacaaataatataaatatcacaattctaacccctataggatcagtattgtaatatgctttgaaagcaatacgtttactgaaacagaacaatacaagacacaatatgaaccaagagaataaaatcctttacctcagtaataatgtcttggtgaaacatggtgttttcaagtgaaaacaaacaaagaatttgccaataaagaatttgaagaaattcagtaaatttggaggttataattttttataaaaaaaattggatgcataagaagctataaatcatttttcacaaagaaaaagtgcaattggcctaacaacttgaaacaaaggggataaaatcatcatgaatagaaagcagtacctatagtattctctgattgctgccatggacatgt

SEQ ID NO: 4227 - DNA, 1172 bp, Glycine max
ttgcatgcctgcagacacattcttgctgaatttaacatgacactttatgtgttgagtatgtctaccttcttctttcgagtttccaatatttcttctataggaggccgtcctggaaccaaaaatggacaattaacatataagttgacagaatcttagcataacgatactggttagcttatagaggtacgtcttgctatcaggcggtggaaatttttaccataccacataaatagttagagatgaaaaatgcaactaaaagtgatagtcttgctcattgatggattgcttttgtcatcaagagtgattagaggatgtcctatcacaataattctaagcttctcaggcttataacctgactacattattccaactaaataaatattagacaagtgcatcagcccagctaaaggaaaaatctatatatggtattacatgtagccatagaacaatctgatggaccaaaagtccagaatgaggaagttggacttgaaaacctagaagaaagcccaaccctgacatatgctaattaagatgtggtttctaattctaaattgctacataggatggaggagggaaggttatatatacttatatagttatattgtaagagactgcatggggatcatgaagggcaacatcgagtttgttgagaaaattgtaactgagaggtgtagctcttagtgtgagggagtgaggttctgtgcgtttctatcgtggttcaggttgtatttttcccttttgagtaaaatcctgttttaggggtttggcagaatcgagttctatgaataataatacgacagtttttttcctttcatttgtgtgtctgattcttgagtctatcacaatgactatatagctacaaggaaatttttggtgcaatttttttaatgtgcattgcttttacctgtaatttgaagacggtatttagcccaaacaccatatatggaatcagcaatttttgcaatctgcaaatatttttttctctccgttaatgtaatatataaagagataaataatctttctcttcagtgagcaataaagaaaggatttctgcatgttggatgaacaacaacttaacaagtccttctaaagtatgataggaagacttactggttcatattttgtaatggcataaacccaaccaagaccaacatgttcgtataatctcctaa

SEQ ID NO: 4228 - DNA, 1055 bp, Glycine max
gagcaactctgcaagtgattgctacaaaacactagcaattaggatatggtttttggtaaagctattgtgcttgtcaaattaagcttgaattttcatcatgactttcttttccttttatttctgaagtctatagcccgtaactttaaattgttgtttaatttctgataatctttgcaattttttttaaagagtatttacaactgccaacccaatccaaatctttctctacttgttcatctgcatcatttgtgtggtgtgtgtaagagttagacaaagccttaactagggagatatttgtagtcagtgctgaactgctgaagccagcaaatatctgttcttgtttattttgaattaactcttttggatgtagttacagattttgaatatgctattctatcctagtgttaggcttctgagttctcgtgttctaattggaagttttcgtgtcagtttcatatattatatatagtttagttagtaatagccgtgggattgcactactgctaaatattcacctgcacggaacagctgaaatttttgtattcacctaatatctttggagtttaatacatatgcactaatagttatccaatcacaaataaccatttaaattattttaagataattattttaaaagtcaataaacttatcatatatgtgaggttgtgattggatgattatgtaaaaccttttacattgttagtgcatattcttttttctcatatctttatgtgtatttatcatcttgacgataacatttgaggaaatttggtatttgctattatgcttcaattttttttactattgctgcaactactaacttttagcacttcatctggcttatgtgcatgagaattttatcgtccatatgtactaaattcctattacatagcagctcaatgctcctcaccaatgacaaaataaaacaaccattgaagaacacgagttgtgttagaattaagggactttgctgtgaatatggtaatgatagttgtttgcaaggttgtctcaaagcccatatttttttggtattgactatagaccatagatattct

SEQ ID NO: 4229 - DNA, 1122 bp, Glycine max
agcaaacggttcaaagaatcacaaacgaatgaaaactaatacaagtaggaatcataatttaaagttttgcagcagaatcacataaaacttccagaatctttcctcctatgtcagagacagaaaaataactacataagcaaaagggcatatcatgccaaacaaatagaattctgctcagttgtaagttgtagcacgtaagtgagcttacaaagttacaagtcagaccagtaaaatttaatttcagttataaaatcgcaagaaaataacgagctccatttcctttgtgtttatgtaatgcacttaggcccttacaagagaagaaaataagaaggtaattgaattaaacttctcgcataagctaaaatgaacttatacatttagttttcatagaagctcatttcatttaccttctccaaaagttaaggtgcataagtggattttagattatgaagaaactcaatacactttatctctaattttcttctaagtgcttatggataacatgaccttatttcacctaattgaaaaagaagtcgatggaacataacagtcaagattgcaaataatatagtgaataatttcacttgccttttctaccatacatagatacatacacataatgaaaaaaaaaaaaaatcaatgaataaaagggaaacactgaaattatatacccctaaaagtaaatacatagtatcatcaaattagaaggatgaaaatcacgacaagtctcaaattagctcctaacgctattgattactaagaaatacaaattacagagactattgaatcgatcgaattagaattgaacaaagaaacgcaaagggcattttaggtaaccttttgaatgagatgagtggtgctcttgccaacggggagaggaacggtgtcgtttaagacgacgcaggtttctttctggctcagttctccgcatctcccgcatttcaactatcacaacagagaaaaagaaaattgaagaaattaaaaaggaaaaattaattaaagagatgttgaattttgaatttgatttggaaagagaaagaaagaaagggaccttgaagaggtaggagaagttggggtcgtcgcagccatcttggggttgcagattcgtgaggttctcaagct

SEQ ID NO: 4230 - DNA, 1158 bp, Glycine max
aggggaagaaaaaaggatcaattgagaatagaagcgtcaccggttcgttagtaaactgggacacgtttagcatgggtaaaggtcggtgagaaagtgatgatttgaggcctgaattccaccaagcacaactccggcaggggaagctgtagcttatggctttggtcttcttaatttagtaagtttcttctttcttatttcttccgtctagggaaagccagcccttttccactatacgaaaggaacgaaagcttaaagcagctgtggtaaggaattggattgagaagctccgcccagtagtgctctacagtagtgccttgcggggtcggagatcataaaaaaagaaagactccaatgcttttctggtgtttaatgaattgtagataggaaacctaaatgccacagctgactcataagaaagtcatgggataacctgacctcgtcaacgagacaggaaaaggtaacagagtcttcggagattcggaacctgcatacgcttgctgcagtgacaccgcgcactgcttaagagaaagtgcagtaaacaaaattccatatttccttgtctaatcgcctctttgccgctaagtccctctttggtactgttttttgctaattccctgatatccaccagatgagactgtttcccaagagcccacagagaagcgcctggccagacaaatagcttagtcgctagaagattccccaactgaggtacaataggtctcaggatcattcgatctatgagaatctctaggaaagctcttgtcgactcaaccgatcaatagaaggaaggaccacctctgagaggagcctcttctagtttttgcatgatgatccctttcccctttcctcacatcaagggatagaaaggcataatattctagccaaatagcttgccccctgtgtccaaagccagtgccagctaatgagacatgccatccatcccctacttctatttgatcgagaatggattcaacgttcttctacatggatgtctttaatgaagaagttaataaaagcaaaaaggtaaataaataaggggtgtagcggatttgatcctcccctaactactactcgaattcatccctctcggtaagtgaagctccctccacccgccgccctctctatccgctaacttcggtacccggggcatttccctca

SEQ ID NO: 4231 - DNA, 947 bp, Glycine max
tagttgtacattgagtcgacagagaaaagagccacatacctactccaacagcgagcactggagcaattaaatatatttgtcaaggtgctggcagaaacacctagagattggcctagagcaagagcttctgatattcccagcatgctcacagccaaagccaaattattgcaaatttttgctgcctaataacagaaccaagacaaaatatgtgacagttaaacaggcaattgggagtaccaataaacctatactaattataagtaatgtgtaacttacagaaccacttcctgctccaccacaatatattgcacttttacccattgaaaagagtaagggctttgcagcaagaaatgcttcctcagagccaccaacctggggaagttccatatcttgttcattactcaatttttttgccaaaaatttaattgttttagattacctcattcccgtgtgcagttcataacattacaacctttgtaattaaccaatcatagctttaatgcattataaataatattgtggcatgactattatcaaaatttaacatcaaattgagaatactaaacttcagtgaactactctagtttggtcatcaaagcatcaatttggtactcaaatgatacttttttgacaccataatagtccaaaagttactgcaaacttgtaccagattgatgtcattcaatgactgcaattaatcatttaaggtctaatttaatgtcactaattttttaaagaccaaattaggagtactctaaaaatttcctttctcactaggaattggaaaaactagtgatacaatgttcatctggtttctaggatcaaatgcatggccattgaagctacaattattaccaatttaccaagtatattgtagtttatgtaaattttcagcaggttagaaaaaaacagtaacaataccataaaagtaagtgtcccagcttcag

SEQ ID NO: 4232 - DNA, 1225 bp, Glycine max
tttatcctttgcctggagattactctgggatgggcttccttctaaggataatttaatcagtaggcagattgtcctccaaaatgacctttgccctttctgccaaagccaagtggaatctgcttctcaccttttcttcacttgttataaagttatgccattatggtgggaattcaattcatgggtgaaggaagatagagttttgcacagcaagcccatggacaattttcttcagcattgttctctggctggatcgaggacttctaacagaaggaggaagatttggtggattgcagctaccagatccatttggagtcttagaaacgacatggttttcaacaaccagtcttttgacatatctaaattgatggacagaactatttttctcacttggtcttggttgaggggttgggaaaaggattttactgctccttttcaccaatggtcctcttatatgtctttgtcattcatctaatgtgtcatttatagggatgggttttgttgatttttggtggctgttggttatttttctgtgttttaggggatgttaccccttgtattttctgtagtacctctggtactatgcttcttatatatataatattatctttggccgttcaaaaaaaaaacaaaaaaaaacaataatattaagctcagtaacttgttatggtttattttgcatttggcttctatgtttttaactgttctttcattgacatttgaatgacatgtaacagatcctgcttctaactgaaatattttctcacatgtcatttaagagttctgatttagaggaatggagagttttgctggcatctatacttcaaccctatgtttttaataacaatccttgattatcgtttttcctattttctatcagggtggaagtgatataaatggaaaactagatgaaggtgctgcaagtttgatacttgatacaaagccatcaaaagtcgtatctgatgaaaggactgtaagtaacagtatttatttattatattttaatgtttctgcttcttatgaatagtaaatttatataattgtgtttggaattgagacatgttactgttgtatttcagaaattgattagaggaaccaaggttaatcttttttatttttccttttccatttttgcactttgaatgtcattaaatttcatgattttctcaaagattttaaatctatctgttcttgagattttacaaaagatgatattatgtctgttttt

SEQ ID NO: 4233 - DNA, 994 bp, Glycine max
ataaggaggccataagggtggtccatctacacaatgaattcggccattcgcccattccattacaaaatgtggtttatgggcctcatagatcaattcctttcatgacacttgtcttgtagtagtatttgttttgttcactatccattacaaaatgtggattgtggttcttttgttcacttcttatgtaatcggttaagaatcccattatatttaattaggaattgataattaaatacataatttaaattatagttttttatttactaaatataattaaatgttatttttgttcactataaccaatcatttgtgtcatacctattactttatatatattttctcttagataaaagataataagaaatattggattcttattctctaacatacttttttgaaaatactatttattggttaaaatttattaaaactcacaaaattgaatgggtcacatatattatttaataactatttctcctaattttatacttttcaatatattttaaccaataaaatagagtgtgcatatgtgaaagagtatgttactaatatttctgatgatatcatgtaattaacagatgctgcacccaaacacatgggattatttcaacatagttaaatatttatgtaaaaaaaaattatcattcataataatattattattatcgaacaaaaatttatatcaagtagaatctatagcaaaaattaccattaactgaagcatcctatgaaacggcacggtctgaagataatgtatgaagatattttgcataaaaatgtgtatggctaagcatctgcatgtgacatattctaaaagcttttgttaaatactacatgcatgattcactttttttcggctgcatatgcatctgactcaacatactagtagtagtaggccattcaagctttatgccttagaaaataaagtacacatttctaagttctaaccttactccgagaattttattattatatttctttctgcaggcatgca

SEQ ID NO: 4234 - DNA, 1239 bp, Glycine max
aaacagaaggaacaaaagagaagtgcaaacaaaggaatcacaaggtgctactaccactagcatccaccttctattgttgactaacaatgcacaaactgaagagagaaaaaaaaaaaaattgagcagcccaagaagagagaaatgtcttgttaattttctctgggtttgcccacagaatgaaaggattgcttttgtcttttgttattatctcagcaggtgcagaggccagtgtgcgctgtgtgttgggttagagaggcgttgaggtgttgtaattattatatatgtgaggcaaatgttgaataacaggttgcttagaatatagtataagaagtagagacaaccttttaattacattacgtaagagagagggaaaatgggtggaatttagggtgtcaaaaatctgattgtctcagagagagagaaagagagttattaaaagttaaaggaaactatactcaactaagtgagataattgtatgttatgggactattaagttcttaatactcatgtaatataaaattaagttttattaatctatttataaattaacttttttttatttatgcagagattaattagaattacggacatatggtggttctgaattatatagtaatttctcatactttagagggaatggatgaagagaagagaaataaaaacaagaaaaagaaacataaaactcataatttatcatgtaatatattttttttccttgaattagatattaaggatatctttgatgttacagaatcaaagacgaattttgttcttaatgactattattaatctaacaaaattttacacatacaaaaattaaatacattaagctaaatagatcactatcctaaatgccgcagagctaatccttagggttattctaacatctaatataatgaaaaggaaaataaataaattaatacataaaataaaagttagatgaaaaatgaagatatatttataataaactaaaagtaaactccttaataaagaaacatgaaggagaagtgggataggcgtgtgtgaatgtgtgggggcaggtaatcagtctgctctttggtcatttcctaccacttccatgtggacaaaacaacgtgggtgggactgtgacttgaacctctctccatgagcatgtggagtttgtcagagttggaaagaaaaaaaaaagtgcaaagtaaggaaatggattttgtagcaaaagaaaaaaaaaaattgaagaagaaaagtgaatactgaaa

SEQ ID NO: 4235 - DNA, 1138 bp, Glycine max
aaaaggtattgggcgcataagttcacatcttacatcttccttttctgaggaggttttatcatcagttttggagctgttttcacctggtgaggtgtgatactaaacttttgtttgcttaaagttcctgagcactgtaatttacttttttaatttacactcacctaggtttatatactatatgtagttactgtgtgagatgtttactatgttagctatttatttgtctggttccactgttatagctcaaatgtaacactttttcagggtgatggttcatggcatggaggctgcttagctttggctgaacttgctcgtagaggcttgctcttacctgctagtcttcccaaagttgttcctgtgattgtgaaggtgttttataatggataagttgtatccatagatttctggaagtaggatttgtgacttcaaactattttggctgcttataaatatttagttgtttgaactttgaagtactttatttatgtgttacttaaacttgaaacaagaattgagaacattaaggataaccttgttatcttgtagtaccttagaggagacatgattatcttggcagattaaaaagtttaaaagtgggtttttgatggatatgattgagaaaatgagggaaaggcctcagaggaaatggaaaagataaaaaaaggacttagtcttggaaaattaaaaaaggcaaatattcccttacttaaatgttgactattctttttttataatgcatatgaagcttaagacatccttccttggcaatatgatttatggttggtactttgtagttttccttaagatatccttattttagagatacatttactacatagcagtgggaataattataattttgtttattaggcactacattatgatgttcgaagaggtccacacagtgttgggtctcatgtacgcgatgctgctgcatatgtatgttgggcgtttggacgtgcatattatcatacagatatgaggagcatcttaaaagagtttgccccacacctcctaacagtggcatgctatgaccgtgaggtccttatatcttttatgtccttctcatgacatgatttgttttagactattcacttcatgtgaaaagaatcgctaactaacctgtgatacttaggtt

SEQ ID NO: 4236 - DNA, 1064 bp, Glycine max
aaaaggtattgggcgcataagttcacatcttacatcttccttttctgaggaggttttatcatctgttttggagctgttttcacctggtgaggtgtgatgctaaacttttgtttgcttaaagttcctgagcactgtaacttactagtttaatttacactcacctgggtttatatactatatagttaatgtgtgagaggtttactatgttaactatttatttgtctggttctactgttatagctcacatgtaacactttttacagggtgatggttcatggcatggaggctgcttagctttggctgaacttgctcgtaggggcttgctcttacctgctagtcttcccaaagttgttcctgttatcgtgaaggtggtttataatggatagattgtatccatagatttctggaagtaggatttgtgacttcaaactattttggttgcttataactatttagttgtttgaactttgaagtactttatttatgtgctacttaaacttgaaacaagaattgagaaccttaaggataaccttgttatcctgtagtatgattgagaaaatgatggaaaggctacagaggaaaagataaaaaaggacttagtcttggaaaattaaaaaaaagacaaatattcccttaaatgttgactattcttattttataatgcttatgaagcttaagatatccttccttggcaatatgatttatggttggtactttgtagttttccttaagacatccttatttgagagatacatttactgcatagcagtgggaataattatagttttgtttattaggcactacattatgatgttcgaagaggtccacacagtgttgggtctcatgtacgtgatgctgctgcatatgtatgttgggcgtttggacgtgcatattatcatacagatatgaggagcatcttaaaagagtttgccccccacctcctaacagtggcatgctatgaccgtgaggtccttatatcttttatgtccttctcatgacatgatttgttttagactattcacttcatgtaaaagaatccctaactaacctgtgatacttaggtt

SEQ ID NO: 4237 - DNA, 982 bp, Glycine max
ataatagctatgtctctaataaacttcctgcctttaccatttatcaaaatcttagtataaaaaaattataattaaattttttgtaatatatgaaggagactatagcatagtacagcatcagcgaggaacaacggtgggaatgacatcactgacaagatcacttcctgaaacatatgaggacatgtgttgctcctcccttgtcacatttgatgttgatgttgttgcagatgatgggggtgctatgttaccagaattgagtaagctaacatctgagaaaagagtttcaggttcaggcaacattgtaatgatatcttccagttctctcaccacatctagcattgatggtctctcctctggattgtcttggcaacatctgagggccagagttaaaaacttgtccaaacaatcagatggatataaccccattctgctgtctattatggaatatattgtaccagattgacgagccgtattaacctgacaataaaattgtgtaacattgttaatagtagcttgtttgttgaattgaattagaatacactaacggtataaagattttttacagagtcatccaatcatgagttgtcatgtatggtaatgattgacagtttaaaaatctctacactaacaatcatcaaagtttaatacttgtttatttaatatttctttgtgtatggtttgcaaataagtcaggtactcgacaattcatatgtacagcttttttcttcacatgcattgtgcttgcagtattataaaattttcatgattgttcttgcaattcagtgtttttagtgatttaatgatcagatatgagagagaagaacagtggagtgatgaaaaagaaaagtacctcgcggacaatgtttttcccatgtgatattggttgcatgcctgtcaaaagctccagatacacaattcccaggctatagacatcacatttgtcagtcagcttatgagtcaacaaatattctgggtctagata

SEQ ID NO: 4238 - DNA, 994 bp, Glycine max
tttggaaaaaaaattacaagttccaaattatatcgggaccaaattgattacatgtaatttcctcaccttcagaaaattaaaattgatttaatgtgtagcaggtttaagtaaaaatatggtaaatggaggcacgggtttttggcccagaagactttaactaaatgcaatatgcatccaagactaagaaactcgcaacctttttggatgaaaattctaccacccagtaagtttaagcagtaaaaaacaaaaaagtctcaccattagcatgagcattcagcctcctattggaaaccaatcttctgtcagaattaccttcacgaaaattgaagattcttaacattcgccacgtacaacctgtctcgtacgtttggctaacccgaggaggagatcttctcgccatgataaagtggaaagctactatctgtgatcttttagtcaaatttaattggaaaaacacaaaattctgtgcaggcacagaaaaaaggaaaggttaatccttgtaaatgggaagtaatcaaacaatgttcggcttcagaattccatccaaatgacaataaaaagtatcagaatctgaagtactaattgataatcagtttcaaaccccacaaaaaccttaaaacttaaaaagagttacaattgaatgatcatactttctaaaactaaacaactatactaatatctataaccaattgacaattttgacatattcacccaacccccgaacaaaagtgaaataaaacaatgaaaaagtatccaccttgtctgttaaacacaaacacgtgaagagcaaagtaagttactttctgaatacctaatgtgactgaggcccaaccctgactgcaatcattaaattcaatagtccttttttttgcctagttaattctaacaagtatcattggtaaaataagaagtctaacaagtatcaatggaaatagcaagtctataacaattatacgtgagagatacctggatataatacccaaattaaagtcct

SEQ ID NO: 4239 - DNA, 1273 bp, Glycine max
acgcctgcatcagaaactcacaagcatacctcaagggaaaaggaatacacctggcagaggtatggtggcaaataacaagcccccacaacctcatcgaagtgcggccaccaacgccttcctcgtcattcccattgataataacagccatcaccaacgacgcagtcgagcccatgttagccatatactgagcatggcaaccgtgaggcgccctgagcgtggacccaaccaaacacagaggctgcacaagagcctcatcctgcaccaccctcacagcagaagcatgacaatccacaatcatcctaaccctattctgcttaaacaaaaacctagaagcctgaggaatatcagtagcgggataatgcaatccaatgtaaggctccaaatcaggcctcttagtctcagcaacaacctccccatgctcatcctcatgaaacctataaaccataaccctatcataccctgtcaattccctgacactctcaacaacagtatcacaaagaagcttaacatcgccaccggggagagattgaagctgcgaaatcgcgcgaaccgcgagcttctgcgactggacagctccggcgatggagagggcaggatcctccgtccgcgcaggctccaaatcgatgacaattccgacgtcaattcggtggaggattccatagaaaggcttcccggaggttctggagtgaatccagatagggttcatgaggctaatttcgcgcgcggagaaggccttttcgaggagaacggcgctggagtgagtgaagagggttcggatatcggttccgagcgcgaaggcggcgtcgttcttgtcgtcgagcgaagggacggactgtggagtaatgccgagcatgtcacgggcgttgtcggagtaggcaaggatgcggaaggagggctcgtcgacggcgatcatggagccgaagggctggatgaagccgccgcgctgaattttgagaaggtaagccgttatctgctgctccgggacggattccgatgtgacgcggattgattgggagtagtcaaaggacctcccggactcgccggactgctcaaagacggcgtggagccgcgcgtcctccgtgtactgcgcgatggccttgctcgtggagtcgatgttgttgttgttgttgttgttgttgttgtggtggtggtggctcagcttcgtccgcgaggtgtggatttgcggcggcggcggaggcggcaacggcgacggcgggacggaggaattctccgctccgcttgctgaagccattggaatttaattaacaccacc

SEQ ID NO: 4240 - DNA, 1241 bp, Glycine max
agcttgcatgcctgcagttgaatgttatttgcagtcaaataatcggttgcttattttggtatgctgtcttatcatgaagcttatgacttctttgaatactgatctttaaggaacccttttaaacctttatgttttctccaagtattttagtacttgtctgaatgttccctactagctactttagaaagacagaaaaacactaatttgttttatagatggtctcagatgacagatctgttgaaagtgaaacagactcagttcttatatgaaaactaggaaggttgtaatggaggctagatcagaagtgtattactggaatgagttatccgttgaaagggggaaaaattatacgtaaattaagccattttctcctgaaatccaacaaactgcatgttcttcctctgtcttttgaaccaaagcaactcaaagtattgaataaaatgaccaaatattataaataaaaaaacatgttaaatgacgcagccatggcggaatggtgtggcagatttttttttacaattgccataggctatttgtgaaaggagccttgctttggtggcaccataggctgcaatggcatgtttatatggcagaattttggccttctgctatattcttacatccaccattgataacactgataaaaaataactccattgtaaaatgtggataaatttaacttgaagatgacaagttatcagacatggaacagttctatctcctcaggaaaatctaatggggaaatttgcaagaacctgacaagttttttttcttcaccttcccaattcttattgtctgaaaattcataatagacttggcacaatgtgtggttgtttgtataagacgaaacaagatgcctaatgagtgaagataacggttgtagaatctcagtacaagaagttgtgaacaaatgcaacaccattctaagatgtaaaagtacttgtgaatgaatctcacattaagtgtttctgaaagactggtggaccatgggatctatattatcaaaatattgtgtcatgttaagtgtgtgtttatgcagatatttttagacttcatcagagtaataaatctaattccaaagttgtttacattattttgcaaacccctgaataaaaacttttccattcaaatacttcaatatatttattatttatattttttcaatgtttcactaatattaaatcatgaactgtatcatttgtcataatttttaacatttccccttcacatttgtgatacac

SEQ ID NO: 4241 - DNA, 1282 bp, Glycine max
aagcacttcttagctttatttcggagtccgggtcccaaatattagtgctgggttctgactcctcaaatttcataacaaggtatgtgtttctaaatattcacaagtgttaaaggctaaaacaaacattgtgatttttctgttttgttgatatatcagtcaatgtgaaataatcttactatattggattatgtctatttatcatcaatgaagtttcatagttatgctactacatagtatgatttactgtagtggaaaatataaatgttttagagcttttatatgacagatcgacttgatttcaacttcctataggcatctattatctaattaggtttttccaattatgagtttgacacttgcatgctaaatctgtcacctcaaccgaaaactttcgttggaagtacaacgaaattaatttttcagttttttttacaaacagttcatctaaggaaaaatggatcataaagtaatatacaacaatgctcctttactagttcctagcttctaaaatccagtttttcttcttccaggaagctaaaaggacctgggataccaactaccattctaagatgtgctcctgacagttgtgatgtatatattgtagctagagatagaattatatccaagttggctgacttttcatcttcacgttctcatggtatgattgaagatcttgcatttcaggattttggtgtctgcacctacaccctgattgtgtgaccatcttatattggttttcgatgatgctttcatagaattagggtcttgaatttatctttatggatgaagttgtataatttctgatttttttttttatttaccctccaacagagactagccctaggtacttcttgtctactaaagtaaataaagaggacaatggcattggcagagaaatgtctggaattagttcatcctcaaatgaacctaaaattctaaggaatttccggtttttatccatatcagagcgtagttacattggtctgcaatcatctagtcgtaggaattcttttgaaaattctaccaaaaatgaagaacaaaattcagaaaactgtggagatgatattgaaactatcagcctccactcatttgattccattgcttctgcacaacgtgaacaggtgacttttttctttttagtcaaaaggaaccattgggggggtgtcacatatgaataacttcttgtgaaaatggtatactttttattctccaacatggctgtggtgttcatatgatgtgtacttatgtcttatgcagttagtcatgcaagaagaagtggaac

SEQ ID NO: 4242 - DNA, 1158 bp, Glycine max
aatttcacatctaaccatcgttcatatcacgatgacacatctgtcttctcacaaagcaatgcaaggtttccagctaaccatcattccacattgtatatgctttctgatgagaaatagaatcagaacagcgtcgtcaagttagatttagatttgcaattttttctcctatctttatatccatgggagatatatagtctaagaagtaatacatggaggaagctcaatgtcgaaatgcctagatttttggatacctcagctctaaagtgtacttgcatggaatgtgtcattcgacttaaacactgaggtgttctttacaacaccccacctccggacagggatgaaattatactatttaacgaaccagatggcccttgttgtgtcgaaagatacttggtagagttaactgggtatcttgcttctatcgtgcgttatacagtgacaactacgtttcacatataagttttgggtgaattcggtgttaaagaatcatggactaaactcttcattattggacctttaccttaccttatccatcctatcggattgtgaaagaaggacgatatattattcacaaaggaagatgatgaactagtttcgtttgacttggctaaccagatgaatccggagcttggtattaaagggtgcaaccccagagcttctcagatagtaatgtacaaggaggaataaataattactagttatttttagatagttatttttatgaatattgatgtatcaattttattttcaagtttactctctgtttgcaaactgatctcatttctatttcaattgtaagaaggatatgcttcctttaccgaatttgggaaattttgataatccaatgccccgcatgtctctgtttgaacacccatcatctgtttaactttaaaatatcagctatgggaatccaatgaaatattatctgttttgttaaataaaccagctatgagaatcaaaacacatttcatctatttttcctcatgtttttcttccactcttgcagtttatgacttggtcatgcttagtcctacctattttgcaacttctaaaaattgatttgactacaatgcttgacatttggggtttaattcggtggtgagggataaaactcccatggcatcccaggatgactttcttggggcatcttttactgat

SEQ ID NO: 4243 - DNA, 1230 bp, Glycine max
acaaggaaaagaaaaactgtcaagataaggctgctaatgctatcaagaccctaagaacacaaagcatagatcatttggtgcatgatgtttcaacaaggcaaaatcatagtcagcattaacaatgatggaaaattcaaaatcataagtacactatatgttaataatacccaaaatgcttttgccagccaaatcccatatcaatttctttcaggggttagttaaggtcattttgtgatgctttctaaagaatctgttaagataattgcagaagttattgacctaaagacaaacgtacctgtgaaatgtacttacacaaattggcacgatccatcacatcaagctgaattccggttacatttggaatgccctcaacagtctgcattgattatctaatgtcaaatctacgacctagtaataaaccatttcttcttccatagaagaaagcaagaaattattatgtgaaagcaaaatatcagtcaaaatacctgctctgcatccttcaggtacagagatcccacaatgacttctacatcagtttgacattcaaaatcatcttccaacaatgttttataccattggctcgatgatggccttccaaatgatgataacatttcagcagctggttgacagacccgaccagctccaagaattaaaaccgcagccttctttctggggtcagattccttctctatgccattctcttcaactttaccaagcttaagtgaaattttacttgaatcttgatttgaaaatctatcatgttcagttggattagcaatagcagttaaagaatcaatgatttgatccagaacagccctgttatctgcaccaacctgttcaaaacccagcatgttaagacatcattgattattataagttctttaggttggtacaaaagtcatagtttaaaatgtaatttccattaaaaaaatgactaaaaacaatgtacactaagccatatggtgaattccttaggatctaatatgcttcgtgttgagaaaacttcattactttagctcaagagcaatggaaggcctcccatctttcaagtatatggaagaccagatcattgaattatttagtaaacatcaaaagaaagagaaagaacattttctgaggacataaacaaatttttcagtttgaaatagataactacttacttcaagttcagagaatgatacggcttcaatgctctgacccacatggcagttgactaagtggaaggagcct

SEQ ID NO: 4244 - DNA, 1085 bp, Glycine max
agaatacattaatttaagcccttatctatcctacatcagtggggcattagctggatgtgcagctacagtaggttcatatccctttgatcttctccgaactatattagcttctcagggtgaaccaaaggtataagcattaactcctcatgtttatactatttatgctgttctgttttgctttgtgtggaaatactggtcttgttttggtcctttttgaagctattttttgtaacaagtctttgcaaatatcgtgacatcatttaggtatatcccaacatgaggtcagcattcatggatattgtccatactcgtggattccaaggcttgtattctggattgtcgcccactctagtggagattataccttatgcaggcctacaatttggcacatatgatacatttaagcgatggggcatggtaaaatttcagtcattctacttaacatctcgtttttttttagattacatgatcatgattgtatgttatattttgtttattgtgcaactctagtgtggtgagatgagattgcagattctcttggactctgcatggttcagcttatcttgctttgtagtattatgccttcattttatagttcatgcagaaggtcatgctagaagaatcagaatgactcaatgcatcaggaaattattcctattcacttatggtgtaatgagtgttgattcagttgtgaagattgctcaatatgtgcctcactttttcagtttaatttttaatgatatccattttgtttttagattatctttttacccatcagtgaggactctgcacacagattactattgcctctatatgtcaatcactaagctggatgaattatttgcatcaataaagctgctgcaccactgctttcaattgagaaattagtggtgtccatgcctcatacctattgttaggttggcattttgataattgattgtagtttagattaaagttctgttgagaaaaggaaccttcaaattatgtcactatggatttatttccacttgtaagttgtaatcttacattaaagatggagttggattccttcacacagctaatgaatgtcttgtttcagtttactt

SEQ ID NO: 4245 - DNA, 1252 bp, Glycine max
aatatcaactaatgctgtcctcatgtttggataaacctaagtgatgggaaaatattagcatgacatggttacaaacaaggaccacaacagcctcaaactgtcactaaaagctaaaattatatagtcaagggacaacagaggtttttctttttccccaactctttgcaacatgaaacacaaagaatgctcagtactgagatacaatactacactgaatttgaggctagggtcataatctatattctataaaaccatgtcatctgttaagatcaatgctaaagcaaccaattatgaatgcctcttcaatgccgttgcaatgaacagtcatgctgtgttgccagtctaggcacttgaccagcatattttagggtttatcatagcttcttgatcattaaaaatcatacatgacataatctgacaaattttcggccattctgtgttctactcaaggcatttcatcagcaaacttgagggttttacaaaacttttagaccactaaaaatcatacatgatacgatctgataaattttttgatgtgaaataccattatttaatcaagaagcaaaggtgaacacttcccaccctacaattggcaaaatgaatgatcacgaagcaactacccaaaaagcttaggttgttaggtaaagacacataaatgaattctattacatctctaatactcccccatatgcaggagtcctttaggcttgaagcaaggacgttccaagcacacctttctagtttctagtattgaaattcaacctttttattggaagaaagtgggtagcaagggccaaggatcaaactctagaccacttgatcatagagattctaatacattgtcatagaccaactatcccaaaagcttaagttatcaagtgaatacacatgaatggttatatctaacatctatagcaagaagaataaaatagcacaacataaacataaaactttcaagaacaatggactgagcaagaagcagaagtaaattgacaggaggacagtgtttaaaaagcatgccagcaatttccgtcattgaccttcacagttcacaacactaaaacacattacagtaatttacttcaaaactatcttgtaacattgatcattttataatgcttataccttcggttcaccctgggaagctaatatggttcggagaagatcaaagggatatgaccctactgtagcagcacacccagctaatgctccactcatgtaggatagataagggctcaaattaatgtattct

SEQ ID NO: 4246 - DNA, 1140 bp, Glycine max
aaacaaaaatgaaagcatgaaataagggttatcgaaacaaaaaaccatgaaagtcattgaaactccaacatgatttagagaaagaaaaaaaaaaacattgtaaccattttttaccaggggattgggtcggtaacggtagccaagcatcatccgctttttgtactgctcgtatatgtcatcctctgcactcacctccccaggttcctgagcaccaacccccaagttattcttcttaacattaccagccatgataggatccgcaatacccttcctggatccacccaaaccctcacctgggaaccaatgattgttagcacaaggaacaaccataatgaaaatttaatatataaatgtaatttcaagcaaaactctcccaacattaaatttaaaaagaactatggtactcggacaagacaaaaacttgcagcggattcctagtattcatatgttttacattgcacatcaaagataataaaccagaaactttttactaaagctcaatgcttgactcaaatcctttaaggcatgttctaaaaaaccagacgagaccggctggtcaaaccagaaaactggtctaatagttaataaaccacaaaactagctttggagaaaaactggttcacggcagataaatgaaaattgtttaatatagcattttgattttttttcaataaaaaaataacctaaagcatttatcattttcttttttattcaagacgtaaaacttgttattgctaatggatattgttgtgtattttttaaacttagacctatgtattataacatttgatttaaactttttgcatgtactttgaatgttaaaagcgtataaaatcatgttttattttagtttttagtattataaaattttgatattatgttttttaatattattctatgaattatttaattattattattactttattaataccagttcaactagattgaaccttaaaccagagccttgactggttcaatgaccagtccagttttaaaagcattccctttaagcacgtgtcaatgaaaaacagcatgagcttgaaaacaggactgggaaaaatcacaaagcaccttctttccaacccatttttgacaggagccggtggcctacattatcagcctgaatcttagccctct

SEQ ID NO: 4247 - DNA, 1150 bp, Glycine max
atgaattgagccattattaaagcattatccaatatcttaaattcaatttaagtattgaaaaaaaaatatcccagtgcagcactcttttcaaagcacatttatgtttatccaactactacttcttttagagtttgactttcatcacaaaactcattcaataatttacaagcagattgctgcctcaagtcaggaacacaatctgaataaaacaaccaaatgtgtgtgtgtgtgtgtgtaaccatatatataatgcatgtgagacttttttaagaagttattaaaaaataaatatgagctcgttatgctttgagtgtttgaaacggagtcagtaaaaaagatccctcaaatgacaagttgaccaagtaacctgtatacatgctcaaatacctcgggtttcttaatataatgctttgagtggcgactgtacaaaatggcaaatgctccatgtgaatcaatggctctttgaatacaagaatgggaaccttgttccagcctcatgatagctctcttactttccacatgttgatatcttgatactaaattgtaatcagaatatatattgttaggctataataaaagaaagtacacagtggtagtaacaatgaaaaattaataagctgtcattgatcttatagtgtaaatcttgtaatcaacccattatcaaggaaaatatataaacacaatgcatggagacactatggacatatttgacaaaattccacaaattctatatattatgcaactgacttgcaaatccattatcaccttaccaataaactggagatcattggaaagagcattaaagtattgcaagctcttggaatacaaaaattcctcaacccccctctccccaaagtgcctcacattttatctttacttagcaatttgtaaaaaaatcatgtaaaatatgggcaaccataaggaagataaatgagccctaagaggcagtcaacagcccaagtaactgatgcatgcgcccctaccatttaattgggtcatcacttcattttaggcatctccatatctcttctccaaagagaaaaaaacgaaaacaaataacacaaagtaacaacaaataaaatccatgactgtgttataccttcctcattataataaaaatcctggtgatcatgaggatccaggtccatat

SEQ ID NO: 4248 - DNA, 1181 bp, Glycine max
acagaagtgttgtttcgggtgacagtcctggtatgaatattttacaaagtttatggaggctatttttcccctcttcgtattgttagtttcaatgccaatatccatttaaaacagattctcttgtcagctgttgactgtattggatttggttgtaggtttcatgccaagcattttggatgtcaaactgcttgatgaagttatcaaggtaaaaaaaattattcctcctctgctgtatactttcctctttatttcttggtcagaataatctgtttgaggctattctctttggctttggtatttctatactaatgaacaagctttgtctcgtgagttttggtgatcacgagttcaattttggagtcatatacataagatttaaatgctttatctggagtgtcatttactaaactctctttagttattggtttaggggcttttgtttccaatcatgcagtgttgtaatcttcataatttgcataaatagattattttgaacaactaattaacttgacacatgaaagtacaggttacaaatgttgaagctgtcgaaatggcaaggagattagcattgaaagaaggtttgctggtaagttataagttaaaatattgagtaaatcctcattctagtccttgagattgtaactgttggtcgctttagtccttggctttacaaaattcttactttatttgttttagtcctttttcacttcatttttcacagctcatgtcttggaacatggtcatttgcactaaaaaggactaaatgagaattttgcaaaattagggactaaatgacctatgcttacaatttcaaattctagaatgagggtttacttgtaaaatgtctttgaatgtataagttgctttatgtttaatgttttaatgttcattatcagcaaagatttgcaatattttggcaatgttaatgtctctgtaatctgtatataaattgaattatgcaatctgcatctaggtttctttatatatttttagtgtgcgtgcatatattctagatgcaatattaaaattagttattggcttgacatccttcatctttagttttgtgtgttgctggatattgcaattcactttaaactacaaagtggtctggtttttactttttagaataggttctatcataattatttcaaatttctgtctaggttgggatttcttcagga

SEQ ID NO: 4249 - DNA, 1274 bp, Glycine max
  misc_feature (1271)..(1271): n is a, c, g, or t
accgttctcttaggaagatcttaaactcaccagcggaccagtgtccctcacagccaattcaaaatagcagctcttaaaattgatttattataggttttctttctttccttttacctccaccagaaaaaaaggaaacttttgtagtcttgatctttgattgtaaagaattacattgactggtccggctccttacagcatgcgatagaagtttataatgtatcaacgaggttgtttgtgtagatgctaatattaggtcggcttataattattgtaaagaagaaagcaggcaaagataaattagatagcatgtaaattgtagcttgcatttactaaaatagatcttatgttttttttttgccataattcagtttttgtagaatatgttgtttgtcttctgtgcatttatatttgtgaacttgaatatttaaataccaacttgaagagaaagtagataagtaaacatctacattcttaccttagttgatgctcacaaaataatttatggccaaattacgaagttatcgatttgctcgggcatatatctttttaaggtggagtcgacatgatgctataaaaatggtggaaaatacatagtttctcacatttcacgctatttaaacctggacatagattgggattggaatctattattttgagagtaatctaatctgattgttttgccctgaaaacttccttttggcatcgaaagaaatttctactttgataaaagctacactgaaaaatcgtattctctatccaagcagttatagcatcagctggctataatcatacttgctggcaaaggattcaaatttttctcatgtttcaagtaattcccacgaggaatgtgcatgcacttaggacaacacctttaatattagtgtctcctctaatttgaagagaaagtttgttagaaatttaatatgaatgctttttcttatattaactcattttacatcaatatgaacaaaggaaaaaaagaagggcagaaccaaaaatatagttgcctaggcctgatgccaagttgccaacagaaacgtcagaaaagcttctgtagatgttaagatccaagtgtaataaattccaaactaacgaaattcactaaaagtggtggacctgctgcctatggacttttccttcactgttatctggaaaccagtgactaactttaggatttcaaatcagtaacacattctatttgtagatccactcgtggaacgagcacccgactcatccatatctataaaaatgcttactgcctgcaggcatgncaa

SEQ ID NO: 4250 - DNA, 1087 bp, Glycine max
ggtaacttcttacacccccgggtcttgatgcatcaatgaatgctcgaacatctcggattgtatgatggtgattgaagcgagaaaccatgcgtgtgccatcagccaacctcagctggattgatgtcactgactgtgcctcatctacaattaaacccattgttggcaatggagcagtacttggtgaagcaccagttgtttgaataggttcatcattgctggagctggtgctacctaaagttcttccaacaccctggaaagcacgatggcgtggcttcactggttcctgcatacattttggcaaaaggaaaaagaaaatgtaaaaaccttaaataggatgatagatagatgcaaaaaactagaaaatagaaaagggaatacagggtagtcttcatcccgccttgtgaggttgacatggacagcagtcctcctatctgctggctcaagctctttgggacattcggacttctttatgctctatattgaggtaaacaaatgattagcatgctctatattgggacagctttcacacattgccgtgctgaaagcagtattaactttagtgtacttgaaagagcttatttaagcttattttatgacatgagcacttgtataaatatttgaaagagcttataaaaatagcttgacatgttcatgaactttttttaaaaaatttgtaagcttatttcaataagttattcaacatagcttataaaaataacttacaacttataagaaaacaagctagccctatttcctctttcattcaataagcttataacgtataaataaatgcttatttgataagcacttaaatcctatctggattaacttttcaatagacattcataggagaagaaaataaaaaggtaaaatgaattaagcttttctaataagttaagattagctcatgcccaacagcacaagtcaaaatccacttttggagaagttaaatgagagaagttcaataaataaacttatgcacaaggttttaaattgcgactgtggtttcatcaattttcatgatattatggaaagttgcaacaactgcggtcacaattgcagccacatacacttcaagaaaccttat

SEQ ID NO: 4251 - DNA, 1258 bp, Glycine max
atgtgtgataattaccaaaaaaaaaaaaggaggtggtaacctgaatcactgtatgccatttaaaagcgcatcttatcttagtttgtttacacgaattgaatcagaaaggtctgacccgaaacggaatggtacgtaccaacgttttcactcaaactgccaaattcaatttttgtcttcagttattatagctatagctgtagctggtacctggtgtggtgactggtgaggaagaagaaaaattaagaaggacactgcaaaaaatgtgttcccaaaactgtttttttttttccctataatataaattcaaccacatatcaaacagaagagtggttgttgacgagaggtcacagattggtttacgtgttctttcataacaacagtgtttcctctcatcatcttttgatgtctcgatttgacccaccgatttcgatatgtcgctgcacactctttaatttcttctcttatgctatgtcaccccccaacattatattccttttcttttcctccaatctttttatgctaagttacacccaacactcatctattaatttaatgaataatgatatatgaatatttatgtttttttatatatttaataagtttttttttctctatttctcttaatatttataatatttatttttttctcacttttatcactctcaccaagtgtcaataaggattcatctaaaaataaaagaattaaaatttacgttcttatatacaccaataaaaaaatttattattagtatttataaaataaaaatatttcatataaaaaaatgcatatgttaattaaaatctaaaatatttaaataatttttttaaaaaaattctttaaatatcatttattgttgcatttaccttgatatcagttcatatgttggttgtctatctataatttttctaacttattctcctgcatgcaatgaactatcgcgtatgtatggtatatacaatcacaaaattataatcattaccatgacgactttaattctcgctagctatagcactttgcaaattcgtatgatgtgaaattgtgaatggtattaatttatcatttcattctctctgtagaggaagcatatggttaattgtggtggtaataagaagcgtgtgtgtttgtcaaactttttgtgtacagacagtttcttctgactttgtttgtggtcacattattagatgtgatatttggtttgaattgtactacaattcagcatattgttaatataaagagtgacttttttgtgtacttgct

SEQ ID NO: 4252 - DNA, 999 bp, Glycine max
cagcttgctgcctgcgcatatggcttccatacaattgatggtttgctgctgttgatttgaaacctggtatagtctagggtattttgccattagtgttctgtcattgcctgcccatatatcttcccaaaatctgaacttgtctccacatcccaccctccattctatctgattcctaagtacagttgagtcccgttgttggttgatggacacaaggtccttccaccatggtgaatgatagctgcttcttctttcttcatcaagggatctccatccgccatacttagagatcagtattctagtccacatctccccttggttctgaaataattcccatctccactttccaagcagcgctgtattaaacgtctgtagatcttttataccgagtcctcctttgtcttttgggagacacactgtttcccaattgacccatgcaatcttcctttgttccttcctccaccccacaagaatctacgttgaatattgaccagcttgtcaacaactttgctgggtaccctgaaaaaagaaaagaaatagattggaagtgaagttgggactgcattaatgagggtgactctcccatcgaaagatatatgtttctgtttccatctaactaattttgcctcacacttcctaatgataggatcccagaccacagcacttcttggatttgccccaattgggataccaagatagggaaatggcatggacaacacgctacagtttaggaactcggcagccaccctcctccattcatcagatttgccaatcaccccaaatcgactcttcgcaaaattaattttgagccctaatgataattcaaaacatctgagaatggtttttatgaccttcacgttctgcattgtagcctccccaaagaaaatggtatcatccgcatattgtaatatgctaactggctccttattcttgcccactagaaagctgttaaagaattttttatccaccgtttctctcatcaaacctgttaaccttctcagg

SEQ ID NO: 4253 - DNA, 1254 bp, Glycine max
agaggctcatttgaagtgaagtactcgaaacatagcatgctagttcaagcttcagtgaaatgttcttttgatttttttacttccttcataatcttgtaataatttcttcattgaaacagaatctttttattgaaaaatattcctacatattggcctaattctgtaaaaccttgctagttgaagctatataataatcagtctttagcggcattcacctatattgccggtaaaagaaaccgcagtataaaatacgctggtttaatttaattgcaactagatattttagcagccatatgtattgccgctagccgaaaggtacttctggtattgcgatcatggactgcaaatttgtgtccatcgtagtcttttaacatgcatataatattaaaaaaaatgcaatattaattttaaggaggtgattttgttcaagacagtgaagatcactgtagataaaactctctctaactcttcaccccaatccaagtcacatactcacatatgatggcttcttcatatatttttatcctaatcccatttctcgtcttcttggaatacaacatcctttcttattatgattctatgtgaatttgtgggaccccactacttgcaagattgttgttagcacggatgtagtctttgcagaaaatgaactacaaagtgaccacactagtgcaaaatagggatttaacatagcactacgtctccacccactcttattcaacacacacatattctctccatagacaaacatgatacagaaattccttctttcttatctcttattttagcttcgagttattatctttcatcaaaagcaagagtattttaaccgagtgagtccaacaaattagcatggcacacttcgttcagtaagaatctgattagaattgaaagttaaaggttaattgtgatcactagctactatttggtgcactgtgaaaaataaacacatgttgatgaacttgaaaagagccccttgttcactataaattagttgtggtagtttccactgccttagctgcaaactaaaccaattttcttcgtctgtgtaacaaacacttcaacaatctactctatacccgatttacaagatgagttcatttagccaaaatccctatgttttagttctgttcctcgttctcactgtgtggatatcccgtgtaatgtctcgcgggctcattacatctgagagacatgagaaatggatggcacaataggtaaggtttcaaggacgcgacaggcatgcaagctggc

SEQ ID NO: 4254 - DNA, 1099 bp, Glycine max
gccagacttgcatgcctgcagaaacttacctgcatgtgttttaacttctcagctgtcagctcaccagtcaaagtgatcatcctgtaatatgagacgtggcagggcagagagagagagagagagttaaataagctatttgaagtaaaagtaaaaggaatactgagaaagaatattcaaattgacataacgaactgagtctgaagctctgaaattttgagcagcagaagacgttccctctctgaagctgctgtatcaacctgccaatgacacaaatgtccgacaaaaatatcaagctgatgaataattatcacattataggatttagtagagttttacgtaacgaaagcaagattgactaattcttcaacgaaaatcgacacacaaggcaattggaaagtaattaagcatattagttaaagggataaattaagtacaaattactcacacttccattgatttctgaactgcgaggtaatggtggcaacttcccattctgtgaaactgaaaattttgattgaatcattatatcattcaaaaccgccaacaattgcctcaaatataatcaagggaaaatccttcactcaccttcaattgcttcagcagattgcaagctatttaacagattcattataagatcctggaattaaaatagaactttccatgagaccataaattggcaaggtcacagttttgattataaaaattctaacattttcctcacttgttgaatagatgtttgctgtaaaagattttgaaggtgagttgtaagaaatgatgcagagataccgttggtgatagaatctttggtggactgatgaattggtgaagagaaatagattcaatagaagataaatgagccttatatatcaagcaagtaataaatgatacatcatatagatgctctgcaacgaacccaagaagcaaaagtttcccaaaattgaagatgaactctgtctgtttaactttataaattgttttgagagaaattaaccaaatatggaatatgctgataaacaaattagttagatatgatacgtatggcttatgtacaaaccatttgtttggaatccaacatccaatcactaacactggcagattt

SEQ ID NO: 4255 - DNA, 1241 bp, Glycine max
tttccctccacaactatggtgtcactatggatgtacttgttcctcctagttagcatgtctttcagaaatttagcatagagcggcatctactatagagattctccaaagggcatggtaatttctagcttcttgaaaatatccagaaatctagctagatgtctttctttgtctttcctagaaggtaccaaaggatatggtacttctctccctttagctgaagatgcttttttctttttctctctagcacactcactcttgctttttctcttctcttcttttctttttcatttttctcattttttttttcattttctttttctttcattttttatttttccttattttccttctcacttatttctttttcaatcacaattattggtatctctttctattgatcatcttctacttccactttttcctcagtctcactcaaaggttccaccactgggtcaattgctggctcagtcaccagctgttgtttttcttcacctatcctcttctctccttcatttatgctcaccattttgctactagtcataacagccttgcactcctccttagggttcttctctgtgttggctccaaagctgcttaacggtcggtctgctaattgttttgccaactatcccacctggacttctagattcttgatggctgattctgtgctttttttattggacatggatacttggatgaactgagcaagagtctcttccaactttgctgttctgtcataaagactaggcccttgttgttgtgacctgctagatggtccaccctggtctttattgaactgattgtcaaggtgagttctccactatccctattgctgattatattgctagccatgttgaaattcagaatacccacctgcattaaagtttggtcttggctggttccccatatagttcacttcatgtgttgtatcttctgtgggaatgcaacaaccagaatcatgtgctccaccacatataacacaaccagcaacctgcaaaatagaagagggtgaaggttgtccagaatgtaattgggttggcaacttactcaatgtttctgttaatgcttcaagttgcttggatagcaacttgttctatgccaacaatgcgttctatgatgtgagctccagcagacttcttttggttgggatgtgttctctatcacgtaaaattgcatggtcattagcagccatattttcaatcaattccatggcttctttaggggttttcaattttattttt

SEQ ID NO: 4256 - DNA, 1257 bp, Glycine max
aagtagctggaaggaatgtcatgtccacttcatcagttgtgaccaccggcctagtttcgcataagtaagttccttcgttctctattctcaacactaacataattgaatggcctcaatgataaaaaaacagttcattactgctgttggctgttttgcttttaaaatcggacaagcccttatttctgtaggttgcatgtaattaacctgtgcaagaagcatcttgatgtggtcttttttgttgttgttagatatggagaggaagcagcacatgttacaaatgaaggccttgacgcagcagggcatgcgattgggacagcttgggctgtgttcaaacttgggaaggcactcaaccccaagagcgcaatcaagccaacaacactagctaaagctgctgctgaagcaagttcagctagactgaaggctaagaaataaggcacggcaacaaaagaatcaggatccccccagcactctccatatagaattctagtttgtctgtttattgatataatcaatcttccttgtgattaggatttatagttaatgttgacgtttcttttcatctagagttctgtttttattcaagtcctacgccgaatttgcgatattgaattccatttatttttttcccctttcttctctaccgatataaattgcataatcatggttggaagtggatcaagttatgtttgtagttgaatggtataaccaagtctctttctagctagcagcaacctctattcaattattagaatttcgtaaataacagaaataaacagtgatgtcaatgaaaccttaaacgtacaatacatcaaattttaaaattctaaaatttaagggatgccagagaggtggaacaaatctaactaaagaaatgaaatgacaaaaggaagaaataccatggactgaggagaagaaacaagtattattatgactaaagaaataacacgttcaaagacttttattccttgtaaaataacacacatacacagactgtatacgtccaaatctgaggtatattatgtccaattatcacttttttcctcaaatcaagttgctctaacagcagcaggcatggaacgtatatactttaatttcacaaactaacttatcattagttttgtataaaaatatcatatgttcaaacacttctagctatttcttacggccttgatttaataactagttttaaatggcttgtaagtcttgaggtccaaaaccacccctgccatgaaccaactgcaggcatcaagctggcga

SEQ ID NO: 4257 - DNA, 1323 bp, Glycine max
agcttatggcaaaaagaaaaaaaaaaaattagaaacaaagacgttcaaaagttggccataaattatacatgagattctccgcatcataccagcaatctgacaaccaaaagtacacattctttaatataagatttttcccaatatgttctctcgactgggcccgggaacttgaattcatatgagtaaagactcatacagttaacttgtgacattatgttatgcataaatttatgctatttggtgtaaaaaatgtgctaactttttcatacattttttttcaatgggaactgtgttacatcacatattaggtaaatctttgtcatcgcgtagattaattgaaatgaaatggttttaatataactagtaattttaaatttatgtcagtatgctgttaatataaatatttagaagaatttttttattatttataatagtcttgtcaactcaaacaaaattagcttccctaaaaaaaatatagtctcttaaaaaaaaacaatatattaggtggatgctcatattcagatttgtaaaaaagccttcattggatgattatttacattttaatagtcttcaacatgatcatcttgacacagtcttttataattcacaaatgagaaattaaatttttgctgtaattttttttttaaatcaaaagtgtcaatgggaagagaagctttcaaagtggccgttagaaaagaaaaaagccagattccagcagagataaggtatcagtgaaaggttacagcaaataattcctgtttactatgttaatgattaatttgcagagttcatcgtcaacaaatcctgctaaaaagttatcatgaatctcgattgaatcaattccctctttgatttgaacatgtagaatatcttaacacagttcaatcccctgctggatgcaattgacgaattagtacttagtgagtgattggttatgcgtcaagttgaatcaaaattatgtcaaatttcaaattaacgtagaagttggtgtctgttgcttttgatttccacatcccatacacgagtattttctctcctgacgtgcaatcaaacacactcttagtatgtgtaatgtttccatatatcatgatttgaacataagatttgttttgctttgtttaagttttcactcgaattatgacttcaattgtttttaagggaaatccaaacacattattaaaagttttaccatttcttaaagtattaaaatacagtttattgtactaattaattaagaagccagtttgttattatttattagatgaggaaagaattaaactgaaattcgcatcttcggcatgcgctgcaggcatgcaagctggc

SEQ ID NO: 4258 - DNA, 1215 bp, Glycine max
agcttgcatgcctgcaggactggctaggcttgcccgcaggagtgaagtttgatcccacagaccaagaactaacagaacatcttgaagccaaagtggaggcaaagaacatgaaatcacaccctttgatagatgagttcattcccactattgaaggagaagatggaatttgttatacccatccagagaagcttccaggtgtgagatatacacagtgtgaaaatatactagaaaaaaataaatttaattcacctcccgttaatttctaactctcattattctctaacatgcagtgttaattagtgttgtttctaactatcttattcaaagttccatactatttgttaagtcccagttaggttttactatatatagagagagggggcctctttcttttaactggttcaggaaacttatttttttattaattaatattagttattaattattaattttttgttagcggtaaaaattaaatccaccatctttttttttatcattaaattaatcttataattccactgtacttaatataatatgaaaaagggttttatttttcagttcaccaaagtcgacctaagtttgattttgggtgtgtgattcatatatgcatctaattaacaggagtaacaagagatgggttgagcaagcacttcttccatagaccttcaaaagcttacacaactgggacaagaaagaggagaaagattcaaaacgaatgtgacttgcaaggtggagaaacccggtggcacaagactggtaagaccaggccagtgatggtgaatggaaaacaaaagggttgcaagaaaattctagtcctctacaccaactttggaaagaacagaaagcccgagaaaaccaactgggtgatgcaccaataccatttggggcagcacgaggaagagaaagaaggagagctagtggtgtcaaagatattctaccagacacaaccaaggcagtgcaactggtcagatagaagtgcaacaactggtgaaggaagtggagaacctaacaacaacagtactggtagaagggacagtggaagcggaagctgttcttctaaggaaattgttactcacagagatgagatgtctgctgttgttggtgtccctccaatgacaagtttcactactcatcttcctttggatattcaacagctaaaacctgatcactttagcttcatccctttcaggaaaacctttgatgaggtatatatac

SEQ ID NO: 4259 - DNA, 1041 bp, Glycine max
tgttacgccagcttgcatgcctgcagtatcacaatgagtgttcgaggcgttaacattattcttaccacatcatactttgtactaatgtttgagtccatgaagttgtttgtgttttttccttttccatttttgtcttttgttttcaacgtggaagacttgtatgttactggcaaatgcttcttctagactgtagtattattttctgatttttcttgttacctgggacaggctcctgtacttttccaggggattgggcattcactaaatcctaccaatagcctggtaatatttctttatggaagttcacattttgtcattgaccttattgtatttataagtttttgttggtttggttacacttttttcttttgtatgcttcaatccaggtgttgaaagttctctctgcatctccttcagccttttctgctaacccaaaatctaaattgacaagtcctccatcactcactggaacttcgatctcattagtttcagttatacaggtatgacattatttcatcatccaattttgtgtgtgtgtatattttttgctgttctcatctgttcatttctggttgtctttgagcatgccctagttcttatgcttttgaaatatgcaagccaggcttgattctcaacctttttcttattccttttgaagttatctgttatggtgttgcctttatggaatagtataatttatagcagttgtacacaacatgtatgtatttgtttcagaatatctggtgttagtgttaagtataatgaatacaatcacctgtttcataaaacatttgttaaatacgttttactgttcattgcatgcttttatgatttttgtagagtttaactatgaacctatgtagtaattcatcacttattatatcctttttcttcttggcaggcaagaaataatgcccggatattgatctctggctccttgagtttgttcagcaaccggtatgaaaggctcacatgtagggttttgtggtacttactaatatgtaagctctgaagctcatttttccacaaatttggattttt

SEQ ID NO: 4260 - DNA, 869 bp, Glycine max
gcattctctgcagatcggaacatctcttaatttttggctttgagacgagagggtaatgcagtaagtgtacatagtcctcttttttgcagctttcctttctttctgaactatattcattattaaaactacccttattccaggtagatgccaagaaacagagatctgcgtttcctccaaacttcgtacattcactggatggttcacacatgatgatgactgctcttgcctgtagggatgctggcttatgttttgcaggttttaagacctccctttactatcaaaatcctaaagcatattcaaaatttccatctaaagtcataaaagtatacaatgttagtttaattgtttttttctggttccaagggaggctgtgtagacctaggaattcaggcaagggaaagggtcaagagtttgtaacaggggtcataataagtctgatgccgttgccacttgagctcttttctcattgggcactttaagacttctaaaagcatagaggatttgtctatttttgaaagccagcaattttcttcttggcatcttttcttaattgtttctggaactggaagatgtagggattcaattagaatcactttaaaattatgaaagtttatcacaagtttaagggaaagtggagttcattttgaggcatgccttctttcagatgtgttatttagtttcattgaattcgtatgttgaatattgcaatttgcaccctaaaaattttaggacctattttgcaaagttcagaaggcaaaaaacacatccttaaactattgctttggatcaatttacatttgaatgttttacaatatcatgttggaggctttgatagtaatgctcaaggcacatctatgatagcaaccact

SEQ ID NO: 4261 - DNA, 1065 bp, Glycine max
gatacgccagcttgcatgcctgcagagtacttttacaatctgcatgagagttctattcacgggctgtccatcaatgaaaatctttccagtaaaaaaccagtgtctgctgtgctcactgttggactgtgctatatcaaacaattccacatttgtcgggttgcgcttaatgtcttctctgaaaagtttggtgtagtattctaaatcctggtcatcaaaggcaaaacccatctccaaattaatctcttctaatgcctttcgtcccctctccatgacaggtatataatgaatctcctccggaacaacactggtctcaaaggatgttagtttctgaatataaacacattcagtcatcctatcatgcaccatagatgcaaaatcattgatttgataatcttgcagttcagtggtggtgaacaacaagtacctcctggaccgttccaaacggttaacttctgtcaaaccacaggcctggcaaattgcaacagcattagtagaccatgctgtggtgaatgacaacctggggccaacttcaacaataactggaatcagaccctccttcctcttcttctcaagaaagctctcagttcccagattctcaggctcgaatgtttcttgaagaagccatccaagaactgaaaattttccaccggaaagttgcgaactaaggccaacattatagcactgctccgtttgtatttccacgatctgactggagattttcacttgagcctccttcaaaagctcagcagctgcactttcttgcataaacgggacacggtacaaatgaacaacttcggaagcgggcttctcaaacaaggcaggttgctcctctacagaactgcttacgccaccagaaaccacagctctgggattttcctgagtctgacaccttaaaggcaaagctctgcgagttgatcccagaccccaattccgattccagagtgcaccccaaagcatgcgacttttctgcctctgaggcttcttcttcaaaaacagagtttgcctggaggtaccctgaaaccaaaatcacaaaaaccaataagcaaagatgcatcgaaacatgtc

SEQ ID NO: 4262 - DNA, 1201 bp, Glycine max
acttcttcggccagcttgcatgcctgcagaaattttttcttcagggaaggttcatatttggaccagatgcaagatcattggccctgacgatttttcttattgctgctcccgttgcagttttctgtgtctatgttgccagaaaactaatagatgatttttctgatcacttggggataaccataatggccattgctgttatattcacaatttatgtgagattctctctctctcttccttctctctctcatacgcatacaaacacacaccatgcatacaattttgttctttgagcctacattgttcaaccgttattgattgggaactttgtttatagtcttgacttgagaaacatttctctatgttgcaactcagactcacttgtttgaggtaaagctagaagctgggattgggttaacttctgatttctgaatgaaatacaacttggctgatgccccttttttcttctgcttatttgagtgataattaaaacaaaactagccatggccataatgaaactaatttgatcaaaatcattaaactagtgcaacaaacataatttttctcctgacaaaaaaaatggaaatctatggccaagccaagtattgtgcattgtgtcattttgtttaaattaaagacaatattttattagaaggggaaacaaagatcgctaagagaagtttgagtagacatcctcctccttaaaccaataatccaaataaaatttcaagcctactgtgagcactttactgcttagctgtaagagagtcattctgaacactgatcatggtgaatacaatttattccattatcaatcatggtgatttcccattaagtatccaagtgtttagttctaactaaagacaccaaatgtcagcataaatagcactctgcaacagaacagtattgtccttgtttttgtcaaagccttttaacttaattgagattaattgctcctaagcaatggggttctgatatatccctgtaagtaaggtgtattctacaaggaaggggatgagaagtacatgattacgtgtgggtgagtagggaagaataggaaagtgaggaatattcttgttgataatctgggacataactgcgtgttgagctggcactgaatagttttgattgtgagaaataaagtatcggaggaaagggtaaaagtgtgaggctggcagaaattgagtgaaaaagtgtggaggat

SEQ ID NO: 4263 - DNA, 1040 bp, Glycine max
ttcgccagcttgctgcctgcagggtaattttaaattgtggcgtagcggctccactaccgattagtgaacttgaagttgtaggacttcttgccagaattaagggtaaaacccctctaatcacaacctccccaacaagcatgcacacgtcttattttgccctaataaaactctcgatcattgctaacgttttgacatttgtgttcagtggtagtttgccgcttagcatttgctggtaacagatgcgtttaaacaacggtttgtttttctctcctagctcattatgttttgacatcatactcatccaaattgttgcattgtgcatagcaacatctctatccttccttccaagttctaatcaaactacacctgtcacctgagacaccacccccaccacatataataataataataaaaaataagccaacacttcattcattcattcattcattcatctctatattgaagatagccacggtcagattttgcctagatttaaagtttcccgatttcgtcattgacagagagtaaaagtaaaataataagaaagctagccaaaaaaaggaaaagaaaaatttaaaaaaggcaagcgcgcgaaaatttaaacaaagcgtgcgactttttttctttttctcgttttgtttttgatgtttgtggttggaaattcaaaagacgagtttcctacgaagcgcgggtagtagtagcttgttgttacattgagattgaggggaaaacgaagcgagttctcgaatggtttcgccaacaagatccttaaacacgagacgttcgatgtccaacacgacatctcccatctccaccggccattctccccacccacgcatctcatccgccatgtccttcttcaacactccgcatatcaccttaaacaagtcctccgactcccacgattcctccctctctcggatcctccgaaactccgaccagatctgctgcctctgctcgccgcacgacaccgccttccacggcggcaattgctggttccggttcaggatctcctggagtgtgtcgaaaatcaacctcct

SEQ ID NO: 4264 - DNA, 1015 bp, Glycine max
gccagcttgctgcctgcagggtaattttaaattgcggcatagccttttagttgccttgtagttgtaggacttcttgccagaattaaggataaaaaccctctaatcattaatttaataagtttatggtaacacaacctccccaataagcaaaagcccatatcattgctaacttttagatatttgtgttcagtggtagtttgccgcttggcattatgctgcgattaaacaagagtttgtttttctctcgtggctcattatgtttttgatttttgacatcatactcatccgaattgttgcattgtaaatagcaacatctctatccttccaacttttaatcaaccacacctgagacaccaccccacccccacataaaataataattaacaaaaacaataaaaataggccaacacttcattcattcatctctatattgaagaaagccaaggtcagattttgcctagatttcagattaaaaatttcctgatttcattgacagaaactaaaagtaaaaatcataataaagcaagccaaaaaagaaaagaaaagaaaaattaaaaaggcaagcgcgcgaagatttaaacaatgcgtgcgactctctttctttttctcgttttgtttttgatgtttgtgattggaaattcaaaagacaagtttcctacgaagcgagggtagtagtagcttgttgttacattgagattgaggtgaaaacgaagcgagttctcgaatggtttcgccaacaagatccttaaacacaagacgttcgatgtccaacacgacatctcccatctccaccggccattctccccaccctcgcatctcatccgccatgtccttcttcaacactccgcatatcaccttaaacaagtcctccgactcccacgattccatccctctctcggatcctccgaaactccgaccagatctgcatgcctctgttcgccgtacgacaccgccttccacggcggcaattgctggttccggttcaggatctcctgaagagtgtcgaaaatcaacc

SEQ ID NO: 4265 - DNA, 1258 bp, Glycine max
aagagggatatgtatataactatatattacttgtggctgggatttaattccggaggttaatttgtggcagtaactgtattgacattattgtagttttggcagctataacaatgtaatcgtaataatgcagctttgaatatgacaaattattacaattgcatgcattatattgttatttcaataatcttggtgattaattattggtttttctgcatatttatttgaaatcagagtctgatcattcattacccacatttcaatcctactttaaaactctcattactggtgtaaactagtgttaaatacctgacatgcactacttactacagcatttatattagatatgatgacatgctttatattacatattaaaaagatatatgttcaaagtaatgaaaagcaatcaaggcatgctaattaaagtaagaaatgttgatccaagtaatgatatgccgcaacaacacgtcagggaaggcaaacaataatttttttaaaaaaataagcacacgccaatgatcacaaatccacgtgaaggtcaataatagcatgacattggtttactgagaagtggagcaaaaacagttgcactatgattcttgtgtagcctggtgtcggtgttaacaaataatcaatttgcgagcggcgagcctaacttctcttctttatgtaattttgtgcattcttttattattttagatgaattgagtatgtggttttgagaattttaaagaaaagaagcgtgggggtgtgtcaagtgcaggggacaaaaacagaggacatattacggcattctaagaatttatatgtataatatacatatttcttaattcctaagaacacttagaagggaaggttccctccaacagttgttcgtgccgtgaacctggcttcttgctggcttctaagggctccgtaactgaatttgtattccaatttcactgtgcaatcttttagtacatgtaatcctatttaagccagataaaattataaaattattatgtacggtaaaactctccaatttgagttatgttatatttgttgctttctttaaaataaataaattgattgtcaaaattggcattgtgaggctgtgttatggagctaattccatccttatttgtttacaatgcatgaaaactgattttttttttaatttaaaaaataaattcattattaataactgaatcgtccaaatgctttcacatgaacctctgatgatactgactcatagttacgtcactacaggcaggcaagtctg

SEQ ID NO: 4266 - DNA, 1073 bp, Glycine max
ctgtagagtcgacctgcagcaaacaacttcaactatctgtgccacaaaagaaataggtcatggatataagattaagagcatagataatcaaacaataaagatacagtccattcatcacttatttttttcctatgaataaatgaaaagtgttttttcccttgatgacatgaaaaatgaaggcatgaaaccagattgaattacttttattgcagcattgttagctcctattgcttctgtggcatactttctaaaactttggaatattttaaagttgagttttataatttggaatgttcacccaaacaaatgttttaagatataaaagctctgttatgaatggcacccaaaccaagttatattatataaccttgatttacttacaaagccttttcaaaacacagcaaacctacaattactaccccatataggtatatatacactcaattaactatatgtttggttatacaagtaaagctactaattcgagtcaacttaagctagcaacacaaaaactactatgtagttgggcatataaccaaagaagctaaaaaatcttgataaaacttactttaattttaaaaagcatcatattgagatgcttcaatcaagatgggcatattattataggaaagactgatgatgtcatattataataggaaaggtcaaggatcaaaagagaaggaatgtttgggcaaagaggagatgacaaaacaatgttattatgacgaagataaagctcctgaagattaaaggattgtgatccattcaaatacaatatgataaaagcatgccacacaattttatccatgtccaatttcaaaaagggtgcatcctttattcataaaatttctcccatttcatcttatattttccatgatttacctaagctacactattaagatgacaattttacgtgtgtctaagctgagtttttcgttcaagaattcaattggacatacacagcttataccaaagacaacctgaactttttaaacctataaacatattacaaacatgcagaataggtataatatctgaaacctaataatcatgtgattatttataaatagaaa

SEQ ID NO: 4267 - DNA, 1078 bp, Glycine max
ccctcaatagaacgctttttattttttcccctttgtcttctaaaagggtttattcaaagcctcagtcccctgttaatcacattgtatagatctaatcttttttgcctatgctcctattgagaaaaactcaagtcccagatcagttagagataagaccatgatagaatagatacgtgagaaacaaccctcaccctatgagctagcttttgggttgagttaggcccaaacctacattctaagagctccattgatccgttttaatagaaaaacctgagttagtgataggaaattagcctctaagtgggataggccttttaagatatattctcgaaggcccaaacaacataagggctgatgccaatttctgttagtgggggagtagtgggaattagttagaggagagagaatctgaatagtgtttctgttatattgggattggcaattgattgcaaggggtatgatggattcggaatagaacttggagttttgagaacctttctctagcttgggggagcatttgctctcatttcgtttgtgcactttccttttctaagtttcattctctgaatttacagtttccattgataattaatacctatcagttagtcactgctacataagctctattgtcaaccaatattaatcttatttgtttttcaatagaagaaaaccttaccctgattcacatgttgtctgatatttcatcatgatgttgcatgcagagctacctttatacctgatattgggaatgctatgtggtgttataagtgtggccctgactcgtttggttgcttggttcaccaaattatttaagactattcaggataagtttggcattcctactgtggtctgccctgctttaggtggctttggagctgggatcattgctcttaaatatcctggaatattgtattggggtttcacaaatgtggaagaaattctacgcactggaaagagtgcttcagctcctggaatatggcttctggctcaattggtatttgctaaagttattgcaacagctctttgcaagggatctgggctagtaggtggtctttatgcaccgagtttaatgataggt

SEQ ID NO: 4268 - DNA, 1062 bp, Glycine max
gccttttgttttttttccaagattttaacatggcaagtccataagtgttgaggaatgaggagtgaggtttttgtagttatttagcactcatttgtccttgcaatatcggatcggacttggggtgttacgaaataattatgattctgtaaatggatgtaattatcaatctcctccggtttctattaacgccttgaaaatcatggatggtacaattttttgtcatatgaacggacttttgatttgttatacgctacttaaaagtgatgtttttcttcttcaagttaattctgcatacaaggaaaatctagccactttttttttcttcactttttccactactagtgactttcgagtcataaccaactcgcatctatttatttaatgatttttgcagtgtaatttctcttaacaaaaactaccaaacctcgctcctgctacatgggtttcagtacactattgtctgtgtcatagactcatgtagttccatgcaccctaagtacttcttaatagtctgccatcttgtcggtttttgtctcccttttttctctttactggagcattatctgaatttttttgtgtaggtcctcttctttcatgaccaaactaccttaaatggttttccataattttttcttttctttttagaacccacttcaaccttctccctgataatcacatcttagtcttatccatccagatatgcccagtaatcaattgcaacatcctcatttttgcaacctacaccttttgctcatgattctgttcactgctcagcattttgatccagagctttaggttgtttaattgtactacatcatgaacaatagaccatgattttttatagttttatttttttattcactattacagtttggtgttgataaagacatgttttttcttcacaatttggaacaaaatctatatgcttgtgttccctgatgaattgctattgtaatctggtttgccatggtattcttccctgatgtattgctgttttggtgtgctaatgtatcatgtatctttattctttttggcagggttattccatgtagacatgtccaa

SEQ ID NO: 4269 - DNA, 946 bp, Glycine max
taaaatgcaaaaggcaatgtgcaactgcttgtagaaaagagggaaaaaaaaaaagaaatgagcacttaacaaaattagtacagaattagtgagtacagaagtaaaatacataaaacttgccatgtaaagcaagaagaaccagccaaatttcagagcactgtcagtcctgaaacacaaaatggaacacaattatgaaacagaaacaacatcaatttggaacaataaaatcaataataaactatcaaagaattcaaataatagagtgattccttcctgttcagaatataaatattgttacaaaagtattatccatgtttttttcatgtaattttgaagaaggtggttatgcatctatagactccacctgcctctcccatccatctcatttcccctcttcttttggtgtccccttccaaataaaatcagatcaacttattgctgaaggtaaactttgagtccatggagctttacaagtctacacaatgacagtattgccttccaaaggctcacattcttcccacacattatccaggtgtacacactacacactgctctagcagtaaaatatttgatgcttcataattgagctaaagcttagcagatcatcttctgcttttttttttttcttttcagtttaacaaatcggctgtaaaactcttgaaaagatatccctattctaaattgcaaaaattgcattaaatctgattgaacactacctcatagcacgataaagagggcgataccacaacacataggatcctggagcaccagaaataaaatagataatagcaagaaaccagatggttggacctacatggaaagacaagtctgtaaattaagcatgacttaacaaaattgatgcatcaatatccagttgcaagacaaaccttctcctttgatccaagcagtagtaactgccacaatattccacaaaagacacagaacc

SEQ ID NO: 4270 - DNA, 1104 bp, Glycine max
aaaatttttaactacaacaataacccttaaaaatgtttatttattcataaaaatatttttttttcaaaacttgtacaccgttggataataactgcatggggtgcagttcaattccaaactccagaggatccaattccattgttttaacgagcgtgataaatttaactgaagcatagtacaacagaaaacagacataagagtacagaagaggacaatgactgcttaaattattgtttcttagaacaaattaaaaggagagtagcaccaaaaagaagatcacaacagagaacagacataagaaatgttaaatagactagtataattgttggttgcttaaatggggtcagtattaatgaatgcattttaggcatgtagtgggaaacgaagtgactgccaagcaacattcttaagaacaaaaggacaatgtttttggtaggcttagttgtcatggtaccactataaaacctattatccagcatcatggtttgcaaagtagcagcttaaattggttgagacttgagagagatatctccaggcaaatcaatagacaatggcactgaaatcagcaatctcagtcacattcttgtgcttagtcttgttagcactaggaaatggttctaatgctgcaaaattgcaatctactggggccagaatggcaactaggcacgctggacgaggcttgtgccacagggaactatgactatgtgatcgtagcctttttgccaacccttggcgatggccaaactcctatgattaaccttgcaggccattgtgatccatacagtaaaggatgcactggcttaagctcggacattgagtcctgccaagccaaaggcatcaaggtgttgctctctttaggaggaggtgcaggaagctactcaattgcatcaactcaagatgcaagccaagtagccacttacctttgaaacaacttcttggggggacagttgtcttctcgtcctcttggccccgccattctagatgacatcgactttgacattgaggatggatcaaaccagcactggggtgatcttgccaagttccttaaagggtatggcatggccaagcaaggcaagcaagcgttcataactgcaggcaatgcaa

SEQ ID NO: 4271 - DNA, 1186 bp, Glycine max
actgcttgatctatcatttggtctaaacttttaagaaacttgaatcaagaacaagaaacacagatgatgatcccccacctagctattaccatcccaagtgtctaagttctttgtttaagaaatgaaagacaatgtagtttgaatgcaccaagatggtgtggaagtatggtaattctctcttgagctagagcctcgagttgatgagtgatgataaaataaagattaatcaaagagaaaacttatcaaaaaggggggttagtttggtccaaggttgggattagaaacaacttatgataatggcaagtctgcaatttatgtgatggatgaaaagaacaactctagtgctgaaagttaagttactcaatcactcaaatatctgaactaaagttctaagaaaaagaaaaatagaatgataaccaaagtgttggagaccaggattgttttggtggagatggaaagggggtccatttgtgagaactcttcacacagccaaattggttttcaatcatttgttattttgttacatgcgtagatcctaatctctctcttcaacttctgtatttctgttttggggcaggggctaattcaacttccttgtcggtagatggtttttagttgaatatgcatgtgtttgggaacaaattgttggtgtcaaaccagtcacatcaagttgttggtccaagtaaacagacacttctggactaattttgatgtcaaaccaaatggatgttatagtcttttgagggacataattatgtgttgtattgctgtagactatagtgttgcattggatgcactaatgttggaaatcgtatgtgcaacattcattggtgtttgtcatgtttcctatgaagtatgaacacatcctcagaacaagaatcaccagttattttgctttcaaatgcacagtattgtatttgtgagttgttaaaaattgtcacagaactgatgatattcaacagtaataactatgctggactagccagagcttttgatccttggtgtacttgaagtcatctgtggtacacttaaaccatttatgaatcaattctgtattcatgctttttgtgatgataataaatcaatactggtttattctgtcaaattggtaattaggtttgggaaggtgtggtaatcttggttgtctgatgatgcaggttgctctactagaggagcaaaaaaatga

SEQ ID NO: 4272 - DNA, 956 bp, Glycine max
gccgcttgcatgcctgcagcaaaatacttacgctttggtgggaatcgctgtcttgggtgaatctggtgggtgtcttcccacaccacccaagacaacattttatccagcacatgcatcaaacacatgaaggattgatggcgactagatggaaatggtggtggttagcattgacatggtctatttggaagcacagaaatagcatagttttctccaacaacactctcaatgcaaataaaatgatggatgaggcagtgtttttactatggacttggctgaaacatttagagaagggttttgcatctcactataatcagtggtcttcaaatcttagagaaggatttcggtgtagttgaggataggaatctaggccacatacttgtattagtctcattatgtggtttactttctggatatgatcaaccaattgcttgatttgaactacagcagagttgtaatctgtaatttgtacctttaatacctctggtactcaattaattcaaatagattattttggctaataaaaaaaaaaaagttgttaaaactgaaaaccaaattacaagcatctaaactccatgtagtactaaatggcaagatgattgtatatgaggagatatttatgtgacacttgttagaaaattggttaaggtggtttggtcacatgtaaagaaggccacttgaggcactggtgagaagagttgattgcatggtttttaaccttgtgataaagggtaaagggagaacgagaataacagaggaaattattaaaaagggatctcatggtgaataatattcccaagaatatgatttttaatggagtctaatgacattgtgtgtttcatgtgggtgacctcatctagtgggatacgactattgttatctgttctttagtccttttgttctttgcggatcttatttttatgtaatgatatgcttgttgctaactgatctttgacttt

SEQ ID NO: 4273 - DNA, 860 bp, Glycine max
aatcgcaattgacctgcatcaaccttcaacggtcacacttatgcagcaacaaccaaaaacacaattttaaacctattttgaagcataacatgaggggattgctttttgttaagaagaacttccatgtacatgttcccgttatcaagcctgttcttttaacaaatatctttattctcttgtccaaaagtggaaggaactgagatcaagacaaattgagggcaaaatctacacaatctatgttcaaaatattgagtgcaggtctctttcctgcaattccaagttgtatctggtggaatcacacacaaatggaatatcaccaaagctattgaagaagattccatccagatcatcatcgctagctagttgtggctgttgatcttttgtgacttccccatcagcttcttctccagaaacatttgaattcttttcaaccaattctctaaataatgaagagcgcagaaggagaccaagtgcagtgggagaagatgacttatttcttgagaattggtaggttttgtttccaaaactttcatgctttacaggtgaatccagagaatctggactgataaaactgttgggaaggaccaaagacttagactcttctgttagagcataattagatggggatgccaacttttgatgctctagtactgcatgtgattcaagattttcttctggggtgcctcctcctgaaggctttaaccattttatgtaagtgctcaaatcaaagtttgttacagcatgaattcctctgtactcaatggctgctatgtcataagcatgcgcagcttctttttgggtgcctgtgttgctcaacaaatatgctattcagaggctaatgaatgaaagagcatactatc

SEQ ID NO: 4274 - DNA, 1292 bp, Glycine max
actatagctattcaaaaatatgtattgttgtaaaagttttaatcaaacaaattaattttcttttatttattatcaatgtatttaattttacattatgtataattttaaaaaaattcttcaatgaaagtgtttttaactatttttttaactttatttttctctttaatatattctctaattttattattttacattaatttttttatttatattatttttaaatcttaaaaaaattaatttttcttaaaaattaaaaaaaattacgttgagaattggaggaaccgaattctcaaacgggattttgaaattttttttgaaaaaacacagtaaattcgtgttctccaaactgaatttatacagtaaataataaacatatatatatatatatatatatatatatatatatatatatcggtaaataattgaggatatgtatgttttcgtatttaattaatttttatgtatgttgggaaaaaaaaatcacataacaacagtctgagactctgagtctttttatcttacacaaaagtaaacagtttggagaagatagcaaaagagaaaaacaaaagaataagaaggaacattttggagacaggaatttacacaaagcgataaaaagttttaaaaaaagtgttcttagatgtaccctgaagcaaaccaatctctctctccaaaacctgaatcttaaccatttgcttccgcttcccatgaaaatcaactaagcccggcaatggtgatttgggtctcatcacttgctccattgaactgctcaaagaggttgttgttgagttgtagccaccaccatccatttctagtttctaccacaatgaacaaacgaagcagaggttatagagcaagagcattgaaaaaaaaaaaagatagaaagaaagaacgtgagaaaaatgaaactagaaggttcatttctctaaagtggaaagttataaactggagaaatggggttggcttgtacttgcacagaatcagttcaacgcatggtggtttgaaaatttctttggcatttattgcgcaacacgaagtcacattggcagagaaagggacatagagaaacaggggagggggggagagtaggagagatggcatgtggcagggcacacgtgactgtcacgaaggaaagttcaaactgaaaaagaaagggtttttcagtgttcagatttgttttgccgaaaaagggcttggaaattctaagaatagtgggacaaatagtcaaatagtgagtgaataatcaaaagggtaaaagtgttattttgagatgaagtgattacagagatgct

SEQ ID NO: 4275 - DNA, 1080 bp, Glycine max
ggcttgcatgcctgcagtgaagtcaatgaaaagttggtataggtatatcaaataaggggagagaaagggagggggtaggggaagaagatgccaaacaaataattttttctatagactaaatctgaaaatgtagatcacatactttagccaaaagccctactgtttaaaagtaaagtccccaaaaatactcagaatttgtagaaactagaatcaggtgattgttaatgcatttgactatttgcagaaccagaccttttacttttctgaactgatacagaaccgatatcagtaccaacaagaaaggttacaggttgaatctgtcacaatcagtttctgtaatagcggaaaatataagataaaaggagatgcggcagtttctttgagggacgtccaaacctcccactctttttgcatatttttttcacaatttctttccttttagtccctcttctactcatccaaataagcagaaagaaatttttacacttcttttcttcctgttttatccccattcaaacaacaattttttactttttttttcctattatctctatccctcctatttctttcttccctaattcattcttcatctaaacagtgttaacaaaaggaatgttcaagaggttcaagtgcaacccaaatagagtttaatttacctaatacccactccattactgatgcaacaataaccaacagtttttccatctaatttgtttgaactaaaatcactaatacattgtttgataactatgtagaaataatataatcaccgcaatgggaaatacatacttctggagaaatgcttggtatatcagtatgttgtgatacattccataattagtacaaatttgattttttttatttgtacagattttgttccattgtatttttgatttgtacagattgtgttccattgtatttctatccttaattaggttgctaacagcttatacataagtcttatattcactctttgaaagatagaattacaataatattcagattattatctttcaagttggtatcagggcctccgatccagggggctctgcttctgcatttttacaggcagccttcatt

SEQ ID NO: 4276 - DNA, 1291 bp, Glycine max
ttaacaccaaaattaagagtattcagtctgattggggaggtgaatacaaacctttctctagcttcctttggcatctttcatagactaatctgtctccacactcgtcaccaaaatggtgtggttgaaagaaaacacagacatatagttgatttaggtcttacattgttgcatcatgcatatttacggatgcagttttgggatatgcctttactacaactgtctatctaattaacaggcttcccaccacttccctcaagtttgttattccttttgttaccttgtttaataagaggatcctaattatcattttcttaaaacatttggatgtgtctgttttcctttatttagaccataccatacacaaactgaattttcgatctcaagaatgtttatttctggggtattcctcttcccacaagggttacaaatgcttatccttatctggtagagtgtacatttccaaagatgttttgtttaatgaattaaggtttccctattctgatttgtttcccttttccactaactccactaccaattttgattcctactttagtctcaatcctaacctttttccaccttctgtcaaccctgtccctcagacatctcaaatgtcaactgctaactcagcttctgttcctcttgttcctcctgggttttctcctttacctgttcattcccccctcaccactatttctgtacctcaaccatctacttcctctgcacctgtctctgttcagcctcaaatttcagagtctactacccttgctacatccttttcagactctgtttctgtacccaattttgtaccagtaaatactctccctatgcaaacaaggtctaaatctaaaattcacaatcctagactacatccttctctttttcttacccaccctaaaactgtaaaacaagctttgacaaatacagactgacttactgctatgcaacaagaatatgatgccttgctgaagaataatacttgggacttagcttagtaccattacttcctaatagataggtcactggttgtaaatgggttttcagggtaaaggaaaatgttgatggttccattaacatgttaaaagcatgattggtagctaagggatttcatcaagttcatggttttgattttcatgaaaccttttctcctgtgatcaagcctgttactattctgattattcttactcttgctctatctaatgggtggaaattatttcaacttgatgtaaacaatgcttttctgaatgggtctcttgaagaatttgtttttatgatacaacctcctggttttgaa

SEQ ID NO: 4277 - DNA, 972 bp, Glycine max
tttaactccacattgcggctgggaaatgtcacacatcatgaatacattcaggttgaaaatacaagtgaactgtggatgcattctgctttctgctcgatgtaactctttttcttttcctaattgttgccttcttctgtaggttggaaaaggaagggatgttgggttaaaccagattgccctctttgaggggaaagtggcaggtggtaatggagagcaagtgcttagcagggatatttacaggcttggacaactttttgatttcttcagaatgctttctttcttcttcacaactgttggttattatgtctgcaccatggtatagttgttaggctctcaatttttttcctggataaaatgtgtcattgacttgtcttggttgtataattaaattttattctattttctattgcagatgacagtccttacagtgtatattttcttatatggaagagcatacctggtaatctgatgggacttgttcagttatctttctgtctttcaccactttttgtccttcgtaatagactaacagcctaatactagtgaggtgctgttagcaaaagctacagcccttgtaaactgttttcacagttattcttacatatactctaataccccccctcaaatcttacatatactctaataccccccgtcaaatcttgcagatattggaactttttatcttttagtcactttttcagcttagttaggtaaaaaaataaaaattattcatttgattttgcatgttatatcctcaattgagcagcaaaaaattatttaaattctaaaatttggctaaatctcatcattctaacttatttaaaaacttattttcttccttgatggtgctttctcttttttcaggctttttctggtcttgatgaagatgtctcgaagaatgcaaaattgcagggtaacacagcacttgatgcagctttaaatgctcaatttttggtccagattggtgttttc

SEQ ID NO: 4278 - DNA, 1270 bp, Glycine max
acatttatcagtagtttgctagcaatgatgttaacatgataacattcaatggtgctcaatgcagtctaacctcggtcaacaactgcggcttcttaaatatgatattctggtcgcgggacgcgtttccattcgtaagttcttaaatatgagaaagtcaaagatagtgaactaaatgaattaagaaaaagattggtaaactaataacaatcttatcagcttatgtgattatttagtgaataattagtcctttatatataactcttccatgccgcaaaagcatcaaggcaacaaattaattgacttgacttgtccctttgtataggatgaagttgacttcactattcacggtttcaagatatggacaaacctggccctctagaaaaataataaagcaggcaactagtctttcatcagctgaatggaacactgtgagtcaactaaatgggaaaagaaatataacaatccacacgtttacacgagtaatttccggataattataatgttcgtaagcaaatcaaattacaaactcaaaatatattaaaataataaaaagacaacaaagttcttgttaaaatattgagttttttttttttttttttaattcacagtgctctgcattctaagtatcagttgattccgtcctaacccaatggcatatgcttcctgaattataaatttcatttttatgttaatacaaactgaaaatttattctgagtttaactcagttaataatatagtttatttatagagaacctaaattcggttacccatattacatctttatgaaggaaggaaaatttttaaatatgacaaactcagaaccaaagattaattttgtagtcgactgaaagaattaaacttgtaaaaatattttaggatttgacaaaataggtaaagattttaatctcacaacgaattattatatggtcaggggattatcatgtgactatagtctcaaccatatgatacgtaatgaaattttttactttaagagaaggttaatgaagtttgattatatgtcatgtaaaaatcaactgaccaaaaacacgtaatgattttttttcctaaataggtggttaaaaaaacagtaggggatcaaactaattgagccttctattcaacagacagatcgcaacaatagaaagataaaaagtcccaaaggaattttgaatgaatcacgggatagacataaacctcgttaactgcacagttgcatggtttaagaagacatcatcacactatattcacagttctacaggcaggcaagct

SEQ ID NO: 4279 - DNA, 1179 bp, Glycine max
  misc_feature (1170)..(1170): n is a, c, g, or t
atcaaaatcaaaatttgcatgcccaaatgaatgactgaaaagaacaatggttgttttactttatacatatacgtaataaaatattttaattataacttcattatcattcttagaaatacaaaaataatgtagaatgacatcacccaaacccaaataacatttctctcgtttatcgtgtgacccaacaactaaaagaagactctatactaaaaaaaagggtttattaattaatttgtttgcactttactgttttgacatttatgtaaataaaatcccaaaaaaaaaatctaacaattgttaagccgtctaaaattctttccacgacagaatttttctaacaattggtaaaccgtgataaaaaaatttgttgttccatatattttgtagcgatcatgacagctacgctgtcaaccatgtttgtatgactgtaaacataaggaacaaaacacattaaatttatttgtactaaaacttacaatgtttacatatagaattaaaataataaagaagtataaaaacaaaaatagactcatacatataattaataatgtctttctcattaggtgaaatcacatagttcaaataaaacatgattatagttcggtttgtcttttcaaaccttgttcaaacttcaaattattcatacatatgccaaaatcaaacaatacatgcacctgaggggcaatagagtaattacaagtcataaataattttatattagccacatcattacataacaaactgacaatcttatacaaactttttcaattttcccccaaatcatgtcactaactaggagaaaaataaataaataaataaacaaacagtttcaaaagcaagatcaaacaacaaaattaacaaatatccacaagacgtaaaacaaacaagatacagtaattaacacgccacaaccaggaagtgatgttatatttgcagaaacaatagttcttaatttatcggtaaaataatttttgactaaaaggtaacttaaaccaaacatgttctaggtttgaataaaaaaattaattaattaaaaataataatttacctgagcaatgtcaccaaaagtgaccaaaatggagtccacgtgtggcagcacagaaacccatcccgaatccgacagcaatgagtatttctgattccttatctggtactgcagagcatgcaagncttggcgta

SEQ ID NO: 4280 - DNA, 1210 bp, Glycine max
aattgttccaacaaagaggcattttactaattcagggcatgttgtggaagtggttaaagatatactgaaacagttaaggtggggtcctgctacagagaagactctttataacctgaatttttcaattgatgcatatcaagctaaccagatcctaaagcaacttcaagacccctcagttgctcttggtttcttttgactggctaaagcgacaaccaggcttctggcacgatgggcatacttacaccaccatggttggtatcctgggccgtgcaagagagtttggtgctataaacaaattgctagagcagatggtcaaggatggatgccagcctaatgttgttacttacaaccgtctaattcacagctatggccgtgcaaactacctaagggaggcactgaatgtgttcaaccaaatgcaggagatgggatgtgagcctgatcgtgtcacatactgcacactcattgatatccatgcaaaagctggatttcttgatgtggccatgtctatgtatgaaagaatgcaagaagttggtctttctcctgacacatttacatacagtgtcatgatcaactgccttggaaaagctggcaatttatctgctgcccataggctcttttgtgagatggttgatcagggttgtgttcccaatattgtcacatacaatatcatgattgccttgcaagctaaagcaaggaattatgagatggcattgaaactatatcatgacatgcagaatgcgggatttcaacctgacaaagttacttacagcatagtaatggaggcacttggccactgtgggtatctcgaggaagctgaatcagtttttgttgagatgcaacagaaaaactgggtgccagatgaacctgtttatggtcttttagtagacttgtggggaaaggctggtaatgtggagaaggcttcggaatggtatcatacaatgctgaatgcaggtttacttccaaatgtacctacttgcaattcacttctcagtgcattcctcaggttgcatcgattgccagatgcttataatcttctccaaagcatggtggctcttggccttagaccttctttgcaaacttatactttgctccttagttgctgtacagaggcacaaccagcacatgatatgggatttttctgtgagctcatggcggttactggccatcctgctcatgcatttttactgtctatgcctgcaggacatgcaag

SEQ ID NO: 4281 - DNA, 1145 bp, Glycine max
tccttcttccctgaatattccttccctttagattttgtgctgaggatggacagattggtggccatgatggcaggattcactctaccaaacggttacaagagaatctgtttggttgctgttattggcaactcatttggtgaaactttattatttggaagtgaagatttcaaggttggtggttttgatgggaaaatcagcctcaacaagggatatgtggctggtatattaacagtggatactgttgcagactttctgcctaggaagggaccattgcgacagagaaggtgagttgaagcttgcttctggaacttaggtttgtgtcttcaagatttgcatcataatttttgtcaacttttgacttgtgatgtgtcttcatagttcatggttcaccatcttgttgcttcttaatgaatcttattcttatttttacttctgcaactttgactatgtcttcctcttttgtcaaactctatagccagtccctggataaaagaggaggattgtctataaatattcactgttatgttataccaaacataggaactgatgtcccgaaaatgttctctgcaccaagcatcaataagatgataaagttttctgaaaaataatttattccacttagttatgttctgttaaatcatacataccctaagcacatcctgcttacccttttttaagtctcaaaacaaccaataaatagccttgatatcccagcatagcataaacctgttggttaaaataactgattacatgctctttacatttcacatccacagtttctttattggttaatttgtaacctttcaactgaatgtgccaaaaaaacttcttttatgctctatattgacctagaatcatttacccttgacaatggttagcttctgatttttctaataattctgtacatggccatgttggagtatgatattcatggtttatgcttcacttaactgatgaatttgtgctgatggctgtaattttttcttcttcaaaatactgtaggactggaattgcatacatatcaaatgtggcagtccgagaaaaatttaggcggaagggaatagctaaacacttggttgcaaaggcagaatcacaagctagaagttgggggtgtcgtgctattgcattgcactgtgatttgaaaa

SEQ ID NO: 4282 - DNA, 1118 bp, Glycine max
agccaaaggtacgaaaatttttgtgttttgtttcatctattgttgggctgatttgttatgctctcagttcctctttcaataaattatttggaaaatggacctggtggaatatactactttatattgttttttgtctctgcgtcatcttctaccttgtctatatgttggcaaacacatgggagccctctttgacctcttcccggttgaaagctcattcagcctttttggttttgcttatgacttctgtatactcctttttcgttgataaagaattgcaagggaaaccagatgtatatagcctagtttcgtctgctgcatttgctatcgcgtctttgggattgtcaactctgactaccttaggattcgaggttgatctcttgtattttttcagcggtgttctaatagtacaactcatgaaaattaatttatggttggtcattgttggagggggtttcagttatttcctcatcattcttcggtctactttagaaaatgagtataatcaaatccaagacattgaaattggtctgcatcgaccatcacaaggaactaacgtttctcaagtgtcttcttcaccccaagctattggtaatgctcatccacaagctgatgctagtcaggtcacccaagttgctttaagttcacaacaaggcaataggcatagaggtcttatcagggcccggtatatgagtcatatagaggagcttaagaaggagaatgggaagctcatcgacacaatttccaagcatgtcggcgaataccttatggctaatgttgtgaacgaagacggtatttcagtgccggaaatgcaagcagatgacaacttggtggcggatgtgttgccacaaggaatcatcaacaaccttcgtgaaaccgggaggctgatgttacagaatgagtgctgcaatgtgtacagcagggtccggagggagtttctgaaagagtgcctatcaaaatttgggttgcaagttgaagagctaaacgtggaggacattgacaagatggagaagattgagagttggataaaagctttgaacataaccgtgaggatactctttcccaatgaaaggagactttgcgatcttgtcttctcgccatcttatgctgcaggcatgcaa

SEQ ID NO: 4283 - DNA, 1149 bp, Glycine max
atctgagaggtatatcacttgagatcctaatctttattctacagtctctctttcttttggtgtgtgcattgtgaattgataatttctctctgttatgtgaattgctgtgagatctagtagtttggtttaactctagaggtagagggtcagaggggtgcatgtgttgataattccatcattatcaaactgcttctcttttaccctcttcagcacaatgatcaatgaacaatcttgctaaaaaaatatgcaggctgacaagtcataattttagaaaacccccaacacatttcaaaggaaaatcaaagaggaccttcctgcatccaacaagaaatacaaaccgaatgagaatcaagcgcttacttaccttcaatgctaccaacacatgcttcaagaaaagtttattttcatttccattaagcctctgtctggcaacagagatgagagacgaaaaccatgaaaataaagaacaatgcttcactagatgacgggtaatcttgtgcaatttaacagatttatttatcacctgcaaagtaaataaaatagcccaatgttatattggtagaggaaaaaggagtagtcacagtgagaatcacacataggaaaaaagcatgtttcatcaacatctcaaaccattgggttcaaaatcagaaactccttgacatggatgtcatcacagctatgaaacattcaagctgataagagaacaataagttaaagtaggatagactttaaaaaataaaaacaaattttaagtatgtgtatttacctcaataatcaggttcttagactcaaaatctgaaagaggagagacgtaaaaactcattagcttctcaaggatagagttcctgatatatatcgcagcatcatcatctgagttcatccctgcatatactaggcgaagcatccaagacctctctgctttgaaattgacagaggtactccaaaaaaagttatcaaacataacctacaaaattgaagcaaatggatttttcaataaaaagcaaaaaattccattaaaaaaagtcaacaaattgtaaagaaatttcaaggccatagatatataccctcatattcaacttagatgaatgtataaaaaatgtacttatagctgcataatgatcatgtgccggatctaacaatacacaagat

SEQ ID NO: 4284 - DNA, 1272 bp, Glycine max
tgcatgcctgcagagtaaataagctagcccaatgtttatattggaagaggaaaagggagtagtcacagtgagaataacacataggaaaaaagcatgtttcatcatattgcaaaacatctcaaaccattagggtgtgtttgggtaaacaactcaatcaacgccgatttcttaaaggagaagaagctgttagatccatttatccaagctacaatcagaaactccttgacatggatgtcatcacagctatgaaacattcaagctgataagagaaattactaatatgctctaaccacctggctgtttcaaagtgtaacatcaggtccaagttcaacaacacaacagaaacacatttaactatgcaattctagccacaagttccaattaatctagcagccaacttcttatgaaataagcagacatttaatctgaccaagtaaatttacagcaccctaaataataaatatatttgttgacacgtaaattggcacaatgcattttttaccagctgttacacaacatatcaagctattactactattactttgttcaaacaatatgtcaattacccatcatacataggcaagctcattaccagccaaaaaaattgatgatttctctttcattcacataactatcaggaggcaggttcctgtttgtgattcaattcacagtatgataatggagctaaaagatgaatacaagaagttgggtagaaacacaaagttgggtagaaacacagtttaggtaagtttcagcaatgcataccacaaaatgagatatgcatatagccatatactactccaacactaaaagtgaaagtactatgatagcagacagaaaaaaaatgaaaaaatgaaaacaaattttaagtgtgtgtttacctcaataatcaggttctttgacacaaaatctgaaagaggagaaacgtaaaagctcattagcttctcaaggatagagttcctgatatataatgcaacatcatcatcagagttcatccctgcatatactagccgaagcatccaagacctctctgctttgaaattgacagaggtactccaaaaaaagttatcaaacataggtataacctacaaaattgaagtaaatggatttctcaataaaaagcaaacagttccattaaaagaaagtcaacaaatagtgaaagaaattccaaggccatagatatataccctcatattcaacttggatgaatgtgtcaaaaatgtgcttatagctgcataatgaccatgtgccggatctaacaatacacaagat

SEQ ID NO: 4285 - DNA, 1201 bp, Glycine max
aagacttgtgggtagctgcactttctcatgagttgctgctgaggcaaaaatccagggctaggtggattaaaggagatatcatcaagaagttttggcccacaattaagtctgatatcctgcgcttcttggacgaattttttgttaatggacattttccaaaaggaagcaatgcctcttttattgcattgattcctaaggtgtctgatccgcaatcccttcatgactatagacctatttccctaataggttgtgtctacaagatagtgagcaagctattggccaatcgattgaagaaagttatgcctaccattttagatgaacggcaatcagcctttataagcggtaggcacctgctgcacagagtcattattgcaaatgaagtggtagaggaggctaagagaagtaaaaagtcatgcctagtgttcaaagtcgattatgagaaggcttacgactcagtatcatgggaatttctgaaatacatgatgaggaggatgaatttctgccccaaatggacacaatggattgcaggatgtttgtcttctgcatcagtttcggtcttggtgaacgggagcccctccgctgaattcaaaccccaaagagacctcagacaaggcgatccattagcgccacttctttttaatatagttgctgagggtctgaatggcctaatgagacaagctgtggagaaaaatctattcagagggtactcagtgggaagccataatgtgaacattagcttgttacaataccttgcattgttgggcaaatggaaattgagcttattccaaaaccataaagagctatgggctaaagtgctggaatcaaagtacggaggttggaggagtttagatgaagcatctcgaggttctaatgattcttcttggtggagggatctgaaattggcactccatcatccgcaacaagagtttgcttttcacaatggcttggagtggaagttgggttgcggtgatcgaataaaattttgggaggacaagtggacttgtggtgggacaactttggcagccaaatacccaaggctatatcttatttcttgccaacagaatcaccttattcagcaaatgggagatcacaaagccactggttgggaatgggatttccaatggaggcgacacttatttgattgtgaggtatctatggctgacaacttcataaatgaggtggcagcagtgagggtccagct

SEQ ID NO: 4286 - DNA, 1168 bp, Glycine max
agatgataacaatgatcatcattacatccctcgcaaggattttggtaaacatggctctgcccaatttcatgtcactgatgatcataataggtaccattgcgtccataatagtaattataaggaagatcgtacttgttatggccaacctggcggaggaattaaagttaatcccgggcccgggcattgataatttactcacaagaatcatgccaagcatcctggcgacgaattgaatatatatatatatatatatatatatatatatatttgtgattaatgtttgataattaaatcggtgatttgtatacatatatatgtacgtgtgcgtaggtaagttacgagaaattcttaactgtgttccttccaaggatgcaagaatttctcagtacccatataatcatagaactgagtgtatctcagtatctgtatgtgtcgcctttgatcagtgtatataccaataaaggagtgcttgtagtaattataatcaccacttgttaataaataaagatcgatctgatatagtttaatttgcttggcagttcccctagcattatttcttcaaaactaaatatttactatgtctttgaataacattaagcaaaataatagtagtatatttagagaaatatatgtcaaataatatatttcttaattaacattttgttattgactgaaattaatttaaaattctaaaaaaatttcaattttacttttattatttaacgagtcttaattacaattttaatgtttttaataaattccaattaataataaatagtaaacaatatgttagaaaacgtgttagagtacttatactaattatgtctttatttataagaacatttgaactaattaacaagagttaagaaagttaatgtagtgagtaatattacccttaaaatgattgagattcaccatctaactctttttacttaaataattaatttgttaataattttctctaatctttaattacaagaaagaaaggaatgtaatcttattaattttataaatttattatttattgacttaaaaattataaaataattttaaaaatttaataaaaaaaacaactgataaagagatattttaaaaaattactagaaaaaagaaaaacatatgtgtaatcataaatgttggaacgaagatagtactaattaagagaact

SEQ ID NO: 4287 - DNA, 1110 bp, Glycine max
aaaagaaacagcccggaatttataaggaaaggaaagagttggatctaactcagttgcagacatcaagtccatcaatttctccttcccaacacaatacaaagacctttcctgatacatccacccaaccggtttatgatcagaaataagtgagttcatcaacttatatgctgaatacgtgtgaccacgcttatattttgcccttgcaactcccactaaagaataaacatgccctgcatccaccgctgcctgaaaccaatgttgtgcatccttatattcttttctctcaagcataacaacacccaataggtgaaaggcaatttgcttctcccaaccatcggttgcgcactccactaacctctccaacagcatcacagtggtgttcgacctcatctcttcctccatggcaatctgactcaaaaaataatacaacacaaacgacacgtgccctgccagagccagcctatccctaccctctggactacaaaacatcttcacaacactcgaactctgcaatgaaccgggaagctcccggagaaacacctgcaagcaagccgccacaagcagatatgcagtctcctccaatccatactccacaagcaacaaggcatcatctatgtcacaaaccagcgacgccaaatgcacatcacaagcgttcttcatctcatcgcaacaaaaccggttcgccaaagatagcaactctaaaacaaccctgggctccaaatggctcaacctcttagtcctactgaacacatcagcagccctcaatgcctcaacagaaaaacaattccctgaaaaatttatcttctccttcaatgactctacgaatccaccatacaacattgtcttaaagggccttgaaagtgaggctatattgaacctattacacttaatctcatcatcaccaacaaaaaaagacatgtcaccatcctcctcctcctcctcctcctcctcctccgaggtggagcattgctcatcaaccactattgtcattgcatcatcatcaatatcacgattccctgcgtgtgcacgcgtgcacgcgcaggaatcaaacaccgactctgggtcatagcccggagtcagcgtggcgcgggggcactcaaggttcctccc

SEQ ID NO: 4288 - DNA, 944 bp, Glycine max
ttgcatgcctgcagaatggtataacaaaaacccgaagcaagtagcccagtttagggatgacataggaccaagaaatctgaaagattgaaaagttctacaagataccccactaacaaaaattatcaatttccccagggatttgcaagtaaatcatgctctaatcccgacaaaaatgtattttttttttgtgcacgtaccagatgtatttgctttggagtaggtagcatgggatgcagaagcactttctttggaatgtaacagcacttcagaaattctatttctatttctaacttgttcatttctaatagatcttggaccatacttttggagctgtcaggtagataggacagtgttatcctttaataagtaaacaagcataaagagtcaatcatcaaattagttcctgaaagatacacagtccatcatattagtccctaaattaaggaaaatatactcatggtccttgaatatgcatttatcaaattagtccctaagattcctgatgtggggactagtttgacagaagaaatgcattgcacaattagggacatcaagcacaattttcatcattcagggactaatgagacaaatgcaacatatttcaagaattaaaatttgattatttactctaaacaaaaaacagaaagaggataaagtcatccataagttggaaaaaatggataaatagatgagtagtaaaatatcaactcggtccagaaattggtatcatggtccttggtaatataaaaaactaacttcagtcctatcactgaaaattttcaatcaatttggtgcctaacagtccaacacacaccaaatcaggggaccaaccaatatcagtggtgccaatttcactttaatgaccaaattgatgcttattactgaatagatggctgaaagatcagaagaaaaatattcaatgtgaacttttatgagtaccccat

SEQ ID NO: 4289 - DNA, 1164 bp, Glycine max
ttcgccagcttgctgcctgcggctccagtagacggcgcctttaggaccgttacattccagctgagtgacatcaagtgtgcttcctgtgtgaattccgtcgagtccgtcgttaggaaccttaacggcgtcaaaagcatcgacgtttcgccacttgatggaagagccgcaatcaagtttgttcctaagtttgttactgtaagtcagacttacgtcttttctgctctattttattttatttttttgttttgttttagagtttaatttctatgcaccgtgggattaaaatttataccgttgaccaatcagagtaggagttttaaatagttttattttgtttttgaatagttaatagtattatatatgatgattctcgatcatgtaataatttctgcaaggtatagattattttctctgtgatttttgatgtgttttataaacagagtcaatataagtgatgcaaaaacccaaatgggtatctaaacatagccttagatgttgtttcttaagtgcttttgatgtttttgtgagaattgaagtttcactttgataacctatcctcactattaatgcaaaggtttattatttggcttgttgaggtaaaactctaatgctgattggagaataacaccaaaagaacaaaaggaaatgcatctatgttttgtctaagttgtcgactttgaaggactaatttgtataaattagaacttcccgggactaaatcaataagagaaagtctggtgatattgtaagtacaaaagtgtatgttaagtacttaagtttttggtgtactccaatatttacactgaccaaaagtctggtgatattttttcttgtaggctaaacaaataaaagaaagcatagaggagagtgggtttggagtaaaagagcttcatgagcaggacatagcagtgtgccgagtgaggattaaaggaatggcgtgcacaagctgctccgaatctgttgtgaatgcccttcaaatggttgaaggggtgaaaaaagcaattgttggtctcgctttggaggaggcaaaagtgcattttgatcctaacctcatcaatgctgacaagataattgaggccatagaagatgctggttttggggctgatcttattagctctgggaatgatgcaaacaaagtgcttctaaagcttgaaggggttgatt

SEQ ID NO: 4290 - DNA, 1008 bp, Glycine max
tgacactgctttgtacttattttcttccttctttctttggtctatgaaagatattataattttaccttgatctcgatctttccaattcaattgtactttcaatcaaatcgcgttttctatgaaattaattctcaatattgtgatattatatatgctgaggtatgtgtgagattttttttatatttttttttttgtaatttcagaaattcttgttagctcaagaagtacccagcagcaattcctagttattttgcaggaagtaaaccactcacttaagttatccttccttcgtcctctaacaatgaaagtaatatttttggggtatgcacaaagtctttcaaaaacaaacaagatctcctggattgtactcttattaattaatggagttctgtacatatacatggcatcacacttccaatatagtccaacaaaatggccttactcctcaattgccctcttgtaattaagatgaaagcaccaattgagaggtggaagcatggcaaacttttttaggtatatgttctttttgagaagaaatttatgcatgaatatatgtcttttatttttttttttcctattttcagactgcgaacaacatcagtatatatgatggttttctccatacgatgtttccagaagctagagatacaaatgaaaaaaaggttcaggactgcatatgaagggataatttgaaaagaagaataaaagaggaaaagatatttaagtaattttttttttcttgaagaaaaagaaagaaaggaagatatatatatctttagataaatataattaagggacgtgtaaatattattaattgtcaaaaaagtaaagtagcagagaactacatatagtattacatgcaacaacaagcggagacaactaagggactcgcttaagtactagagtcctcatcgccctctctttattttcattaatataaattttacaacattatgatatatagtatcctgcgactgaaaaactgccctgcaggcatgcaagctggcg

SEQ ID NO: 4291 - DNA, 1123 bp, Glycine max
  misc_feature (1116)..(1116): n is a, c, g, or t
gtacattacacatttttttttattttttattttaaaatcatatagtacaattggctcaaagtcacatccaactgagggcgcaactccactttatcttcttgttcattcttcaatattgcacattatcaatgatagcagcacctgcattcttgactcgtagtagcttccactagtaatagtggagtgcacgttgccccaccacaaagctattattagaccacactaaactaaagtccaagtgttacaatctacttgcggagaagattacattacaggtatattaacattaacataaattcgtacttctttttagtaacagtaataatcacatttgcaaccaccctgaccctggaactataatgattgtccaaaacaccgttacaagagatccataataataataatgattaatggaatgttaaagatctaggttgtcattacgaagcaagggggagaccacttggataagaacttgaaagaccagactaatatacagattaactgtgtttcggttgaatgtttcagaactagcaaatcaaatcaagacattttatgtaaaatgtaaccatacaataaacttataaattaacacatactatcattctcgatgataaaaaaataataataataataatactatcatcatcctaaccggtcaaaaacaaaattaataacaaatattaattaattaattaattaattaattaactaactaactaaaagcttgctctctttagggaagtaatagtaacggaagaacccaagggagaagttcccacttgaatctcgaaggaatcatagcgaagaaagaactccacaacgaaaagcctcgaaaccaaggtgacgaagtcttttccggcgcattgcttgttcccaagtgttggagactcagtctcaggcccattggaccacagcacgtgcttgaggagcttctccccttcctccccgacgaacctgtccccgacaaactcctcggccctctcgaagatcctaggatccttcgtcgcgaatggttggtacccgaacagcatctccccttccttcacctgaaacgcgtggtcgtggctctcaatgatcaagtctctcttcgccctcccgaactgcaggcatgcaagntggcgta

SEQ ID NO: 4292 - DNA, 1064 bp, Glycine max
tgctccaacaagtggtttttgtctctctttaactgttctttttccctattcatctccctcacatggtcctttgcaacccctagctcgtgtgagacgtttgagatactgtcctcgaaatttttacagtcatcagaaactttccagcttatagtttctatgccagtcgtgacattgttcacacgctctttaagattagaaacaatttcatcaaaagcttcactgttggcagttattgttgctgacaaagtagcaatcctgtcctcgagggctctctgatcttgctgaaacttttcctctgccttcctaaagctttcttccttctcactcagtaattgttctgtgacccggagcttctggtttgacagacgaagcttaacctcaagcatccgaacattctcaaccgaagtactgatttcatctcctttctcttctaggtctcttttaagctcttccactgtatgttccaaatcagctaccttcttatctttcgactcaatgccttcatgaaactctcctgccatttcttcaatcttcttctctgcaacttcaagtttgaccatgcattccttaaacaaactatcaatttgtttatattcttcattcaacttctgatatgaatcttctcgctcttccagtgatctcttaagatccatagttctgcttgatatgtcattcttttcattctctaccattacaaggctttgtgcatgttctttgctaattttttcacagtggagctccagttcttcttttgttttctgaaaggaaagcaagtctttttgcagattatcaatttgggatgtgaaggcaattattttccttgaagcctcactctctttttcacgaagcttttcctgtaaagtagataagtctgactctttctcagctaatgttttctccagtgcagcaattgttccctgtagtcccaaaatttcctctcttagttcagtgttctcatggcctttagctctcgattgctcttcaacttcactcttctggttgtgtgtggaatccagctccatcttcagcttttcacactgctgttctaattcatgtttctcatt

SEQ ID NO: 4293 - DNA, 988 bp, Glycine max
tcgctcccctgcagtttacaacaccttcgaccccgtcaattcgtatttctccgtcacagcaaacgccgttacgcttctttccaatttcagcgcctccatcacatgccaagctctctcccaagcctacctcgacagagagtattccctcgcgcctttggattcggacactctctcccttaccttcaaaccctctgggaaacagaatggtgctttcgcttttgttaatgggattcaacttattgaaatgccggagttgtttgattcggctcctatggtggggtactccgaccaaaccatggatacaaaaagttttcattttcagacaatgttcagattaaatgttggtggacaatttatatctccgaaacaagattctggtctaagcagaatgtggtacgatgatacaccttatttatacggtgctgccactggtgtcaccaaccacgctaccaaggatgtcaaaattgactacaaaaccatgccacagaacattgctcctcctattgtgtactctacttcaagatccatggggaacaataaggacgtcaacatggggttcaatctcacgtggatcttccatgttgatccgggttccatgtaccttacacgattgcatttttgtgactattactattccaaggtgaatgaaattgttttcaaaatcttcatcaacaatcaaacagcggaggctgaagctgatgtgattgggtggacaggaggtaaaggagtgccaacttataaagattatgtgatatatgtgaaagatgaggcaggtgatgatcaactctggcttgctttgcaccctgcacctgaaacggagccagaattttatgattcgttacttaatggggtggaggtgttcaagctcaatgacacggatttatctggtcccaatcctcaaccttcggagatgttgattgaacatgaggagcacgcaaagactttccaaaacaaacatggtagtaataagacttttgttattggcagt

SEQ ID NO: 4294 - DNA, 915 bp, Glycine max
agcttgcctgcctttagaaataccacggaccgttcaaatttgcttcaactttaaagcctttaattaatcataacagaaatatgtacacatttaatatataaatatgaagttcttcataaaatttaaaattaataataataacgaatgttttgaaatgaatactcacttgataaagcgattgtacgctgaggggactctctgtctcttctcaggagctggacaatggcaccccagtcatatatcaaaatcatttcctttgactttcagttgctatatttattttcttcttgcaatttaaattctctattttcgtggcatggagcattactggctctgtctgcatatatatatatatatatatatatatatatatatatatatatatatatatatatatatatatgcttctgattctgatgatatactcagtgttaaaagctttaagcaactataattccgggggagaagaaactgccctatatatgtctttctctctctctaccacctatttttccccatgccacttacgaacaccaaagttaacctacgtttctcttcatctctgtcggggcttctaacaaaaaaattaatcaaaatgaaattaaatattattgataaaagtgaaaatgaaacacagcctcacagactgtgccctagaatcagaaattaatagctaggtattacttgctgttctttacattcattaacttccccagatattgagaacccttttctagggcttaatttggggggtgggtggtcctttttatagacccgggtccttttttttcctttttaggaccattggaaacacttttttgggggtggcccgtttggaaacaaggaagggttttagccctttccgcaaagaaccctaaaagaaccttttcttttccccgaggacccgttccttcc

SEQ ID NO: 4295 - DNA, 1146 bp, Glycine max
atgtatacgccagtcttgcatgcctgtagaaaccgtattgctgatatagcttctgaatgtgttgtcttactgctcaaggcagctcctagagaagccacgactggtatactaaccaatctccccaaggtgactgtgatcctagagagctggaatagaggcattcctcacttgatggtccagcgaatgcttcacgctttaggttatgcttgcaagcaatacttactgaatgcaatgatattatcaatatccaaacctgagatttcaagaactgaagtcatagtttctgaactcaaaagttcaggtggatcagctttagccaaaacagctgggctggcagccttggaattgcagcggttgcctcgctgcatttgaataattgtaggtatcatgttcctctcattagagctgtaacttttctagttcaacgtttacccttatatttcggctcttattaaattcctgataaaggttgagcaatttggtgaattccactcaggcttcactgtatttctatgtaaagcatgtgcactctatatcttcgtggtgaacattaaaatataagtcaacgaattttttcctcctaaatttttctataaattgattcttgtccatgtaatataggctcctttcattaagttaaacactaacgtattttacaagtataaagttacccaggaaaaacccttaaatggggtgaaactgcatgcatatgaatatgattgagattcctatttgataggtaccatggtacacaattacacatacttccaagacagaaagattgtcagctatgtaagaaggattatttcaataattgctgctcaagcaacaaaaatgtccagcctagccacctttatgctcataggaatgttcgtcacgagacaacctcgcgttaaaaaatcaacatttaccatgcaaaatagtaacatgaagacagatgatcatgcatctccttttgtaagagttagaatacgcaacaaattttgaatcattctggtttctgtctttttgtttgccgggtattttaaaatcaccctttgaagacgaagcagtatgattgtgaactttgtaaagcaagactacagtaagttttcccgtttgctaataattaacaaattagctttagggatcagcaaaaaataaaga

SEQ ID NO: 4296 - DNA, 1072 bp, Glycine max
gttgaagctgccagcatgatctgagtttaccttctattggtaagaacagatcatgtggctgcttcacctgttgaatggaagcatatagaaaccctaatttgctttctgatcctcctcgagattttcatccggtttcatagaaccctaaaaaaggtttcttcaattcattcttgcatcttgtatttatacgatggatgtggatactatttcattgttgtttttcctctattctacttttcacataaatatatatctatatattcatgttttctggatggctgaatattgtatattcttatgttggctaaatctggagattctatttgaatcagcattcatgtttgcttgattcttgcaaaaagaaagaggaaaggatgctggaaatgttcacgattccagtgacagtaacgcactaacgcgtttcggtggtgcgttctcctaccttgaggttggggacacttagtttttaattattttcattagtcacctaatcaaaactgtttttttaagttcaattttttctgctgcatatctaattatgcattgattagtctactaatcttatcttaccatcacttctactaaattgcatattttttgttctctttgcaccaattatgatttgggtatacttagcccaactttcagatctacaaaaactgaatatagatttgcatcacaattagacattggattaattgttcctctctttccccaaccccctatcatatatatatctcgatctctataacttggccacttttagttaatcaataaatacagatccttgactcatagtaatagatgcttgtactgacacaatcaaaggtactaaattaattgcgttgcttttctctagatttgatcatatattgtgaaaaccattactgctggatggcatgaaaactataaatgtgattctatgaacaaatcaagcaaagaccatcatttaattcagtccttaccatatttaaatggaatgaattacttggtccactttgacttgattgagagggttagtatacctataggatatagtttcactataaattttttatttacgtgccttact

SEQ ID NO: 4297 - DNA, 1093 bp, Glycine max
atttcagatcaatagacccaaagaaatacactttcagcctgaacggtagtgtttgtcttgagaagcagaattgcaaactcattttttttgtatggtttgaatttcatacaattaattcctgaatattagttttatgattattaattaacaggaaggaagcctatgactctggaagagatgatgaagcttggtggagggtatataccaatgctgcaaacctctataccagagaaaatgaggccttacaatccctatgaagaaacagcagattcatcccataaggctttcacgacaacattcccacgtgggtttgctttggaaattctgcacgtgtattctggaccaccagtgatcgtgtacaagttcaggcactggggctacatggagggtcctttcaaacgccacgccccaactggagagaaaattcaattctatggaatggcaattttcacggtaacataacttccatccacagataatcataagcaaccattttcttaacattaatactaaaataattaatgttaagaaggtacaaaatggataaaataattattaagattttttcaataagacaacttttcacatttatgtacttcaaattcaagcatgtttcctatcaacttgataatctaagtgatattgaattgaatttcttctcgaattaaaaattttgtagataaaaaaatataattaaaaaagaaaatttttattaaaaataataagtcagattttttgataaaaattaattattaacaaaaagcaatgaatcctctaatatactgaagtatgttttgattaattaggctgatgtcaatataattatattacagctctttccagtcaacaattctatttatttttttattgtttggggtcatggtatgcatgcagttggatgagaattcaaaagtcgtgaaggtggagtttttttatgatccggcagaactgttgggaggtctcctgaaaggtcctgaggatggtagtgttgaagatgctattgcaagctgtcctatactcaggaacaccggctagagctagcagcacaagttcaaggaagccttgaggaaaaggatggccataagtaaaaatt

SEQ ID NO: 4298 - DNA, 1264 bp, Glycine max
agacaccctctacctacctcacaatattctctcaaaacttgcctacccctaacagacttcccacaatcctttttagtttcccttccctgctgattctcaatcatttccctctggttctctcctctctgaatttgccagctgtccttgtgtaacagatttctattttagctcaatccttcttatggtcatttctccattttccaagtgaccctagcctttctgttatgcccattctttccagtccatgtgtctttctctatatacttgggccaaaggtgtatcagttgatcacatgtatttattaatgtaggttccgttgcccgtgagactttccgtggaagattgtgtaaggttaacttgaggaggtttaaccatatatgtgacttgcatatcatgcattgaatttttgggattttcttgttatttctcatttaatccccttgccattaagggagaatggattctaccagctaatgtaaacaatcatcttctctcaagtttgactgggtcagtaaaataatcatataagaaatattattccttattagaatttcatgatcaatatgcagaactcagtagttgtcaggtggctgagagtcaagtgatatcttttttggttatacattttctgattaggcattggtatattctatctatatggtgtccattagccatggactagtaatgcaaagagaaaattgtcatggtggatcatggcttatagtttgactgagttctttccgtgatgctatgttagtatatgtttggtcattgtgattttttttttggcatttgtgctcttgctggcctagccttgctgtgtaaaaaatgattggatctctataacaatttttggatgaaacttgcttgtatatgttgaatctctttattgagccatgtcttaacatgttctactatttattacatgttcataataaacttttcttttcctgatgttatggcagtattatttaaggtctggggggtgtaagttcggaaaggcttgtaagtttaatcacacaagaggaaagagttcatcagcatccgctaccgagcttaacttccttggcctgcctattcgtgtggtataaccttaatttcttacttagcaagttatgctgaaagttagtttgtgtacactatcttctgtctctctatgctgtctgaaatacttgtccctgaaacttgatgaggttgtttttcatgacagggagagaaagagtgcctctattacatgcgcactggctcttgtaagtttggagca

SEQ ID NO: 4299 - DNA, 1161 bp, Glycine max
taggtattaacatttaatgtttttttttttataaaaaaaaatgttaggggagaattaaaggtgtggttttcctttaaaattttgatttgtttgttataattgtgaagagtgaaggaaatatggtttgtagaggactggaatttggatgttgtttatgggagattatttatttatttatttatttatatatgcgctttgttttgttgcttggtttaatggtgtttcttcaggtcgagtagatttgccaggctccaaggtattcagtgtgctatggctgggaagaatgcttatttgagattcacttgtagcacgggtgatgccatggggatgaacatggtttccaaaggggtgcaaaacgttcttgattttcttctgaatgatttccccgacatggatgttattggcatttctggtaatttctttccctttcccattttgatggatgggatttactagatctttctttctttccttttttaattttttaggactggatctttcttttgttaaccggaatgatgtcaccattcaccaatgctgtttactttgttatatgctctactaatactatagacatcggctctttgtctcctttcattgacgtaattgtttctttcatgaaagtggtccaatcatattatattaattctttccgtattgtctttgatgttttaaccttttttttttatcaatattgtattgcactagtgtaagctttccgtatcatattgacgtgctagcctatttttatattcattgtgttgtattatattgttataggtattatctgatttgaacaggagatttgtgttatttaatgttgtaattgtagtcgttcattatacttgtggtattatcaagttgaattattttcggagattgatttgtttgcttaatatgatctatgaactatgaacatgatacaaaaaattgtgactgccaaactcttacattcatcaccattttatttaacttgcttatctcttactctcttgaatatgttggtttatttgatttgatgcctataatcaggacatgctgaaattgttttaatgggaatattaattagactgaaaatttgatggttatctactgacttgatcctttaggaaattattgttcggacaagaaacctgctgcaggcatcaagctggcgaaaca

SEQ ID NO: 4300 - DNA, 1138 bp, Glycine max
ttgccccagtattcttcacattttcacttgggacaaaaactcattattttggaaggacattgcttcatggaggtgcgaagtatagacccactggtcgaggatttgtggttttccatgctaaatttgctgacaactatagactttactctcgtagccactttgtcaagggtattgagctcatgatattgcttgttgtatatcaaatttttggtcattcttacagaagtactgttgcgtatatcttgattaccgcatcaatgtggtttatggtgggtacctggctgtttgctcccttcttgttcaatccttctggttttgaatggcaaaaaattgttgatgattggaccgattggaataaatggattagtaatcgagggggtataggtgtaccgcctgaaaaaagttgggaatcttggtgggaagaggaacaagagcatctccaatattcaggaatgcggggaatcatagtggagatactgttatcgttgcgattttttatctaccagtatggtctggtatatcacttaaatattacgaagaaaggcccaaaaagttttctggtaattcttaaaatacgttgtccccttttcctgcattattatctcactaattataatttggtaagttgaatggaatgatcgataccctttccttggctaacaggtctatggcatttcgtggttggtgatattcgtaatattgtttgtgatgaaggttagtaacaagctgctagtgtatcttgtatgggcaagttataattgtgtgtatatgcttccacagtgtgcacattctattgtctcactggagcctttgctcattgatgtatagtgtgggtgggtgtattcttatagtgtggtcttgttcgttttcttgcctaaaaaatgtatacacctttccatggtctgacacaattcagttttttgttttccttgtctcagacagtatctgttgggaggcgtaaattcagtgcaaattttcaacttgtcttccgactaatcaagggaatgatattcctcacttttgtctcgattcttgtcattttgattgctcttccgcatatgacagtgctggacattgttgtttgcattctagctttcatgccaactgttggggaatgctgcaggcagcaagctggcga

SEQ ID NO: 4301 - DNA, 1057 bp, Glycine max
cgccagcttgcatgcctgcagttccaagaattatttcaaaccgctgcttccattttagaatccttgttatgtccttttctgcacagtagattagtatgtcacaagttgcatgttgggccggttgattttatgaaattaataagagttaaatatgtttttagtccttgcaaataggaaaaagttctccttttggtcctcaattatgaaaatgtgtcctgtatgatcttatttacataaatgaggaaatgaaagcagatgatacttttatgaaggacaaagattacatttgacacattttcataaatgagtgactaaaaagaagcattttattttttagtgattaaattaattggaaacattacaagattacttttggtcatgggttcaagaatccggaaacagtttctttgcatatgcaagggtaatgctgcttacaatatccctcccccataccttggcatagtgaggagcctccgggcaatggaatacactagtttttatagtacaatatttttcatttagagttactgtgggacaaaaggaacttaccaaaaatgaattgatctaagctcttgttaggtaggtactcatacacaatgaggctctcagggccttcaatgctgcaacccaatagtttgacaaggttcttgtgttgcattccactaatcaaattcacttcattgaagaaatcatccacccattgcctattattgaagaccaatctcttaacagcaacatcattcccatttggcagagtccctttgtatacagaaccagatcctccttgacctatctttcttgaagagctgaaataatccgtcgccttctctagagtttcatatttgtaattcaagctagaattcttcaaggaaggaggaacctcaataaaattgttttctgagtgattcaggagaaaatgaaatacagcatcagcaaaattaacaaacaatcattccaaatatatattattggtatgaacaagagtgttctccagaacattacttcttctctttttggtgaaggccacataagagactgcaagagtgagaactacaac

SEQ ID NO: 4302 - DNA, 843 bp, Glycine max
  misc_feature (800)..(800): n is a, c, g, or t
aactctatgtatggtctcaatcatgggagctcttaagcaggttaagcaaggatgtgagccctcctgcttccacaattttcccttgatttgtttctgtaacaagttggatagatgtaagggccaatgagtcttataacaccaagttctataaattaaacatagttgagaaggagatgatttccttctttgaataagtgcatcaataaaccaagccaaatatatgatatgtatcaaaggaggaggaaggaaaagaagatttaatatttacaggtcattattttttcacttttttccccattcatttgcatgatgaggaatttcaaaaaaagcaggtaaaacaaccttcagcagctagatttgctacaactttcacagcatggattcgcacatcagcatcttctgcttcaagcaaagacaaaattttctgcaatcccactgtaaaaatatttattttatcaggaagaaataagtccaaaatagacacaataatctattaaatatcaacaaaagaggggtgctagtgacactctcccaacactttctttgattggctgaaatttattagaaatcacaaattttggtgcgttccccttctaaatcaagagaaaatcattaaatgagatatgggattcaccaaaattggtgatttccaataaatttcagtcagaaagaatatcgctagaattcctcattaacaaatataaggttgtgtcaagacaagtgatatattctaattaattactaccttgctcaaagagcttggctatggagggtttctctccatttcctgagcttgctgnttgatgtttaacttggagagtgagaggattaagaccaccccat

SEQ ID NO: 4303 - DNA, 1136 bp, Glycine max
ttggaatggctgctacattagcatctgcttgttctgttcctttgacttcagttctacttctgtttgagctgacaaaagattataggatactgcttccactcatggtaatccttcaatataattctcttaccaaaaaaaaggaaaattactgtttgttgcatgtgtagttttccactgttctactatttcctatgactaacaaaatgagtcaattgtaaatgtcttctttttcggtagctgaattattaaagatgattggtatactctgaccatgattccttgtgttcttaatggttatccataattccatatctcttatattacaccatggctagagaatttgtttctttacgacgccatggctttgttgtgttttgataaagtatatgaacatttatatccatgcattgaaaaaagaactgcatattttttcttcaaattcatatgtatatgtgtagctattcttgtatgcaataattgcttatgtaattaactctttttaatgcaaccttctctgtctttcacgttaacaactttaatccaactactcattatgacacagttgcttatttttatgctactccctctaaaattgctctcaaatgatcttgcatttttcttaaacttcttgtggttggacatgatctattgtctgtgaagtgaattaacttttaatgtggttttgaattcataaattcattgctttactccctctttcaaaatatctattgctttaggaagtttgttttgttaaaatttaactgttgttttagaaaatgaaggtggtgttttctttttctaactttatccttgtttggtatctccactaaatggaataagagggagcattattggtgtaatggatgctttgaatattttagcaaagggtaaattagccaaatgcagttacattaatagaggctatttcatagagtttctagactaagagaattgagagagagaaaatgaagaagtaaaatatcatttattgactcaatgaacttcaggtttacaaacagtatatatagacaattctgttggtctctaacagaattggctaactactaactaactacttacaactgactagcttctactagaagtaactaactagcttccactagaagctagaggag

SEQ ID NO: 4304 - DNA, 1231 bp, Glycine max
aagaaattccaagaggtattgcaaagagagttgcaatggtgttgagactgtagaaaaatgacaaaggattagcacaatcatgttaatttacaaaatctcacaagattgttagattgtgagctccagttcaaggagggcctgaaatgatcctcttcatttcttctgcataaccatcctacgtaactctctgttgcaccttgttttggtgatgacaataatagattatcttgcatgttttttctgacctactaacccaacacagtgtgagagatatgagtctccctatatatggctatggtcgggtataaagtataaacgacggaaataagtgataggctcgtttgaaagagacagatgaaggaaggagacgagttacaggcgccagtcgtcaccgaagaagcagaaacatatctcctctctcacggcggcagtgccacggttgtcggagaagcagcagttctcacgattcagggctactgcaataataaggcttagcggggtagagaatgagaccaatgttttcttgtggatttttcttgttttagtttcactagaaattagaaacttaggacctttggaagtgaagaccaaaggcaaccgttgtttatctaggtcaatatttaatgtaaataagaagaaaaaacaattactacaaatgtccttaaactaaagaatagaaatgggcaaaaaaaaaaaaatagttatagagactaaaatcggaaatctaaaattctataggaacaaaagcttatctaaacttaataatttaaatactcaaataagtaaattttttatattctaatcatataaacaatcatttatcattacacagcacaaactaaaatactttttgatgaagaaaaaaacagatttcaattcacattaaaaatacatttttaaaaaaatacaaactaaaatactaattatacatatattagaactaggggagctcaatgtattttatttttggtacaaaaggaataaaataaaaacaacacaaagaacctaaaaaaataactacgattctcgggtgaatgcaacacccatagcatctgccatcagtacagtggatatgtcttctgaagtgggatcattccaagttagaaattgtttctcttgagaagcactctttttggctaagaaatctgcccatgcattaccttgatgtaatgtatgtctaacatgaacagtcctacttaaacagagaagtgcttgaattcttttgatgatt

SEQ ID NO: 4305 - DNA, 1001 bp, Glycine max
atcagctccttcactgcgtcctgttgggccattgtcaccaaacttcttgtgccaaagaaggattcgcttatttgcaacctcacatgcttcttcatttgtcattacatcccataaaccatcacttgctagaatgagacactcatcgtttttctctcgacgcacaatattgacttcgggttctggaattacccatggtttcaggtatctatcacctgttgggcaagaagaaaaattagacaacaaagattatttgaataagaaatttatgtaggaaaaaagttgtagactgaaatcacattgaaggaagtgtactaaagtcacattgaaggaagcatactaaagtcacttactacaatgtaccaataaaagaagaatttatgctctatgcactaacagtgtaaaatattttactaagatggttattgttaaggttaataaacttatcatacatgtcattttgtgattggatgacaatgtaaaagttctttacactatcagtgcataatgttttacttgtaaaagaacacttgcatagaacaatgtttgtcctcacattcaacttcaggactgaacaaataacggctaaaccatttgaaacagtttcatataacagcataatattgcaagaaaaccaatcatattctagagatcaagcaacaagcacacatacctatggaccttgacattgccaagacaccaagaactcgatatcctttccaatgtatgactcttcctcccgcagcttctatcctagcccactcgtcctctctatttggctgcaaaacaggaagtcaagtttcctctatcagacatctttggcttctaatataaattcaccaaaagtactaaaaaattggaatgaaatgccttactttgtggtcagaagacaatggcatggcttcttttccacggtataagacagttcttgaatctccacagtttgcgactatgatgtgggttggcttaaaatggcaaccactgcaggcatgcaagctggcgaa

SEQ ID NO: 4306 - DNA, 1177 bp, Glycine max
agtattttttaaagtacagtgagaaaatgtaaaataaataaataaataaataaattatcttagctatcatattattgccgataaaaaaaaatgtcttggctatcaaagctcttaaagcttaccatttagtacggatccttccgtggcatctttatacgcccatttacatgcatctatggtactttcagatgcgtatctaaaaaaaaaattacccaagttaagtatgtatatatgctttgaataataatcagagacaactaaagaagctggtttctttcataaaaaaaaaagaagctggtttctgttgtttttctagttatgggtttttgggatttaaataaagaactcatttttaagcatgtgataggatggatatgccactattttcaacatcagagaaggatattatatttttatattctaaaggattattttaatactattatatgtattgtatttaaattatttataataaaaatcttaccaagaaaattgaaagatataaacgtgaaactcgcaaaagaaacattatagaaataattggatttgggtaaatgatatattaattatattattaataataatgggacatacgtagctgggcatggaaggtcattatcaccgcagttctcccattcttctatctgatcggcccatactttctgtttatttagataaaaataaataaaaaattgaagatatacaacctcaaacttcacaacccaaatccttatttagattgatgattaaaacaaaattgcatacaataccgtaatattctgttgaagtgcatcgatgaattcgttcatgtcagagtcataaaaattgtcgacttctgtctgaaggatggtactatcccaaacctgtatgtatatgaaggtaaaattaaacatatcatattgtcgtatatatagtatgtgaagacaagaaatggcaagttttaatgcattccttcatccagtttctaatttaaggactcatatttttatctcaatacatcagattttaaaatgcacacattcgagatttaaaccatctgatcttcacctaacggtgtcgatctatgaatccatgaagaaaaaattgacttacatggtgaagattttgcttccttttataccagcgaacagtaattgcattgcccccatgtctgagagaaagccacaatgtagaggct

SEQ ID NO: 4307 - DNA, 1287 bp, Glycine max
taaagctaattgtaatcctgcccaatcataacactcacacattttcgaaaaaaaaaaagttacagttaaagaacaagtggttcgaagtttcttcaagttgttgacagaaagcataccttataccactaccagctatcacaatattccttttacatagattctcttttgtttgatctctgtcaagcagcaacctttgacggcactggatctttccaaattcacttaaagatatccgattcgaatgatgtgttctgaaaatgtagcatttcatacacttccttgacagaatactcaactgatttgatgttattttccatttggtgtgaatgcttccttggagtgtaagttgtttaaagctaagttaatgttctagcagcaactctgttaataatagaagttgaaccatgcgtcttggacttcaaccttctttgagtttgatagaaagcaagcataaaacaataaatattaatactcgacacatgcttcaaatggtttcctgcttggttctgattctaggtgtttcatcattggcttcagcatatctgaaagtgggtttctacagctccgcgtgtccatctgccgaggaaatagtgagaagcacagtaaacaaagcaatttcagacaacgcgggcatagctgctggactcattagaatgcatttccatgattgctttgtgagggtaagttcaagtccataatttcgtatgcatattaaaatatatcagtttctggttacaattaaatcaagtctcggaaattgattgctactacgtacgtatgtagagggttgtgatggttctgtgttactagcatctgcaccgggtaatccaatagccgagagagacaatttcgtgaacaacccaagcttgcatggcttcgaggtgatcgaggaggccaagacccaattagaggctgcatgccctcaaacggtgatgaagtgccccagaatctgcctgcaccaacctccagtgcagatgaaatggtcacactttcaggagcgcattcaataggtgtgtcgcattgttctgccttctcacacaagatccctctatggactcttcatatgccggcgcactgaaaaccaagtgccctgcaccacctttcaccacttccacacccattcgtttggacagcaagtactatgaggggttgatcaaccaccgtggcgcacgccagtcaaaccacaagggaaatggttcaaagcaatgctaacaatggtgcaaatgcgttccatagaagtccttacgggctctgatggcgagataaggagacactgcaggcatgcaa

SEQ ID NO: 4308 - DNA, 1078 bp, Glycine max
agacttgcatgtcctgtcagcacacaacacaaatgtatagcacaatccagtgtaacatatttgaatatgagaacctttttgtttcatggcacgacgaataagtgtatcaagtttagcattataaggttactgtatcaacagacttcggatttctatgcccacaaagaaagcataacacaaaacattaaatgttgaatcaatggtatgcaaatgtaaaacggttaaatcataagaggaaattaaatattggttttgctacacacacacatatggtggcatacatgtaagatttaatggtcatgattatattcacctctcaaactctcacatgatagattccctatctgcatttatatattagtctggttgattaatggtttaacaagcagtaataattaaagtgagtattctgttaagaaatcattgctcacaacagaaaacacacctccaggtatatttactgagatcagaaaacaaaacttattcattcaagaatcaactttctgctttggcttgaccacactcagtcaaactgtcaaagtcaattgcccccaatttttacctaagcaagaaaaagaaaagaaaaaatgaattcccatttaaatatgataacagtgacaggcttcttagccaaataacttgggtgacctaaacctctctgtctctaaccaaactattcgatttttatccactttagttaaagcactttctggttaagaattaatcagaaacaccagtaatgaagtaggctatgtttggtttgccagtgagtgagtttcaaactcaatttgaagaaaaaaatgagtttaacgtcatgtttgatttctcctcaaaagcatgtttgaggctaaaaaacaacaggatattttagcaaacttaagtttgtaaactggaatccaaacatgtattgaaatttcagtcataacttataactaaatccattttatcaactcctatgtcattaagactgtcctttatatatacacacgtgtccacagatgctcctctgagtctctgacctcagattcatcaaacaaagtaactttacatgttccagggtgacatgatagttgagcag

SEQ ID NO: 4309 - DNA, 773 bp, Glycine max
  misc_feature (615)..(615): n is a, c, g, or t
ttgcatgcctgcagaacaaattttatctagggttgttgaagaggttatatggaattttcaatgctgggatatgattatgaatggtaagatatattggtggtccagcatagataactattgaatgtgaagacaaaaaatttcaaaattcaaagtactaatattaaaataattcaccaaccaattaaaataagtgaatcatggtagttcaaaactagttactttttttaattcaccaaccatactataacaaccctgaatagtaccctaaaaaaatggtaactcaacagatctaactaacagtacttttttttcgagtcatgaaccataaactggggaatagagatttgagataaaaatatttcctttaccgaaataggaaatgagtaggataaggtccaaacaccacacctaatttcaagtgcatagcactaattctggaaaatgatgcaaaatctgtttgctatggctcaatgaattcatggttctattctatactatgaaacctagatactccaaaaatggcaaattgtcagtgttgtacccatatataataccaccaataagcatcatatgatttgcctggttacctatccaaggaatacctctaatatattnttttggtaaccatcatccattggcattactatgcattaaagagaaatgaataatttctctttacaaatattatacattcatgtaaagtttttttttttttttaaaaaaaaaatcattttaacatatctaaagtttgtttgtagctagaaactttcaag

SEQ ID NO: 4310 - DNA, 1255 bp, Glycine max
tatgtaatattggttgtttttgttgtcccaccatctcatttacatatatatatggttcactgttcaatgatggaagtgcttatgtaatttatataaattgcattaggtccaaataatgaaaagactgaggcatccaaatgttgttctcttcatgggagcagtaactcgacctccaaatctttcaattgtttctgaatttcttcctaggtaactagaatttcttcatttcctgagcttaatttgagactgttgtggatttgcaatttttttggaagttgatattttcttgcactaccagcataattaatgaaatagacaaatagtactgttctatactacaaaaagaataatgctacatcttccaaaaattctttctgaattgctttagcaaatgatgtggcatatgccttgagaaggagaaaatgcttattggatggtagaaaccattaggatttttttggggttaaaatagcggttgaacctctcttttctatcttaataattccttgattatatatacaaaagcagtactcttatcttagatgcctttagtgtataattttcataaaaaaaaaaattgtgattgtgctccataccatgttctaatatatgaacgctgtgaactgaaaatataggcatgtatttgcaaatgtacaatttacatgttactattgattagaacccaacttatactgagtttatttgattagtaacttaagaactcagaaattttagatgaccatactcaagggtatttattttatttgattaatgtctttttggagtttgattctttgaatactgagacgtagataatcttttgcagagggagtttgtatagattaattcaccgacctaacaatcaattagatgagcgaaggcggttgcggatggcccttgatgctgtagggattttgttgtctttaattgcaatgcaacttcattcagcaaattattgctataatgcccagtagttctcatgatataaccttgtctcctttgactattcaggctcgaggaatgaactatctgcacaactgcactccagtgattgtgcatcgtgatttaaagtccccaaatcttcttgttgacaaaaactgggtagtaaaggtgctaattgaatcttgtgattaatgttcctcaatagtgttgtgagtgctatttgttgataggttataacttttttttcctggtgaataggtatgtattttggcttatcacgaatgaagcacagtacattcctttcttccagatc

SEQ ID NO: 4311 - DNA, 770 bp, Glycine max
ttgcatgcctgcagccgagtttcgaaggtctgaagatgtttcttcctcttccctctcacatgggaagaagtaatacttgggaccatctgatcctggtagcgccgagtaccgtgaggtgggttgttcctaacaggttcaggcctttcctccatttgtatgtcttgaggaaaggcaataggggctgattcagatgagtctccaagcccttcctcggttccattttccattgcagctcttgaagctgcttcttgtcgccacatttgaataagtgcttcttgcagtcttacttctgctgcatctattcccacaatgggaagaggataatttgaaccaagttcaattccagcagcttggagtacagactctggtgcattccatggatggtgtatccattcagttggtaatctagcaagttcaggaagccagcgtcgcacatattctccatttgggtcacatttgtagcccacaaactagaaaatacaaaactcaaattagtggatttatcacagggtatttatcatctttaagcattcaaagtgctgacagtagcatataactcgagtctcaaaatgtcaatatcaaagttcataaagtataacacaaatcttaagagttcaatccaattgcccccaaaattgaagaaacaaagttatgattgataaaaaattaactcaatagttatgattgatcaaccatattcacggcattcaagtgatacaaatgactatctcaaattttcaacacgaaaaagttcagataaggcaaaagag

SEQ ID NO: 4312 - DNA, 1261 bp, Glycine max
tgctttttccagcaattctggaggcagatagagcctttctttggtttgataaatgaggaggatattggttactggaaacagaaggtactaattttttccctatcggtgattatgagttttgcttttctttttaagagtatgtgttagatcagtgattggcgtgactcttgtcacacttcaattatggtgctttcgtttgaaagaaaaggtagtttagtaatgctttggatttgtgctggtgtccataatcttatagccctgatgaatcctttggttgattatggtttagaatttattgtttttactataagtgtgtgctgattctgtatggaactatggccattatattatcagtttgatacgcacacatgcacccatggtttgatatatattatgtaattaccaaccaatcttatataaattatagtttcattaatactggagttaaagcatgattttattgatctgaatttcttatacctatcatgggaataaattatttaaatttctttaataattcattcttctttcagataaatcttgaatcaagtggattgatgccaagtccagttccttcatatatagatgattgtaaagctgttgctaatgggtttgggttaactggctctgaaagagattttgaacctggtgatcaaatgggtgctgcaattgtagcagaacagttacaactagctaaaggagattctaatggaatttccctctgtcaaaggctaatatctgctttgatttcagaggagtgtagcagtgaaagtgaagatatcatgtttgatgcatgtgatactgaatctgaggcagatggagacttggatcaccattctcaatctaattctcatcttgcttttcattctccttataacggttataggataactaggaagtcaggacatgatgagactgaaagtgatatagttgatatcccatcaactaggttaaattcaagccagaacatgcctaccttgatctgttcagagttgcaatatgccaccttgggtatgaatgaaaagcttctcttggagcttcaaagtattggaatttccccagaatcagtggttagcttactttcttaagaatttttgtgctgtttttcatgaaatctcgatattggggaactaatacgaatctatatcaaatttgattaaactattttgttctagtttattctgtagttccttcagcagtctactcatcaatagacctaaagaatttatttcaagatgttttgtctgttattgtataatct

SEQ ID NO: 4313 - DNA, 1250 bp, Glycine max
aaaaatgcaaaggcggtgaacattgatgggtacgaggatgttccaccgtatgatgagaatgccttgaagaaagctgtcgctcgtcaacccgtaagcattgctattgaagcctctggcagagctttgcaactttatcaatcggtaagcgtctcacagtgattactacattgttcctaagtggtaatgtaaacactatgcaaagtgcaaactccaaaatttatgagaagctacttgtctagctcaattgattgaacaatgtgcatcagttgttggaaatctcccagtacctgtgttcgattcctatgaaaaaaaaaattgttaagaagcttgagactacaacattcaacaatgtatagatgtcatatgtgtgctaacaatttctggttctttattttttcagggtgtatttactggtgaatgtgggacaagtttagaccatggtgtggttgttgttggatatggctctgaaaatggtgtggattactggctagtgaggaattcatggggcactggatggggtgaggatggctatttcaagatgcaacgcaatgtgagaacccccacgggcaagtgtggaattacaatggaggcctcctacccagtgaagaatggtttaaactctgctaattcagtttatgaaagcactgaggtgtatgttagcagtgcttgatataacaaccttcatcgttatttatgatctttggaattgggaagaggaacaagtgctcaagttgcaaatgtttctgttatctttgatgcttctattgaatatgtctgttgggctattcttgtacatatatttcttcaggttaaaaaactgaacctgattatcaatttgtactggttttcactcattgttattccatttgaatgttttatctgaaatccttaatgatatggatgcgctagttatatttctgaattctgatatggatattgaatgtttgccaagaccctatgcttcttttcttcaatatgaaaaactcggcagtgttagaaattctctaaatcagcacctcattgttcaaggttgattctaaaagttggaaaatattctggtactactctctaattgcttatcattgtgctatgtaaaaattcaattgaagaacaccggtctactattaatttagcagcagtctatatagtttatattgcagttgtattaactgcaataaagattcttgatgcactatataaactctagtacatgaagaatttatatttcagttgctaccaatgaaaaattt

SEQ ID NO: 4314 - DNA, 1295 bp, Glycine max
aaggtaagttactttactcttgttttgcgttgtagccttgtacattatcttttgatactatctgaactggccttttaattcagacaaaggagtacctgagttctggctaactgcaatgaagactaatgaagcactggcggaagaggtagtggaatttgtgtgtgctgtgtttagtttccatctgttgaaatgattgtaggataattatctacttttcttttcccctttattagattactgaacgtgatgaagggtccctaaaatatcttaaagatatcaagtggtgtagaattgacgatcctaagggcttcaagctggagttttattttgattctaatccttatttcaagaattccgtgctgacaaaaacatatcacatgattgaagatgatgaccctatattagagaaagcaatagggtaagtaatttttgttaatttgcaagtctttatatttgtgtttttattttctgcacatattatttttaatttttaatatttaaacattctaggacggagattgagtggcatccaggaaagtgcttgacacaaaaggttcttaagaagaagccaagtaaaggatcaaagaatgctaaacccatcacaaaaacagaaaaatgtgaaagtttcttcaactttttcaatcctccccaggtccctgaggatgatgatgatattgatgacgatgctgtacgtctctgatttatatttatctagtatccaatatctattggaaacttgtcaaatgagtgctgctgaccattgattgtctttgatgcttgcatggataggttgaagagctcgagaatttgatggaacatgattatgacattgggtaagtcagtagtgaatacttgagcgatatttcttattccttttgatcgaagtgatgaagacttttggtctatcaataatacttttcattgatattaaagcttagtgtatttattatctgatggtccctagttggaaaacgctttttttttttaattatttgttctctggtttttcatctttttttagttagtttccactgaaaaatatttgttgaacttgaaatgtagtttggcatgttgagtataaagttgtttatagtacacgcccaacattatgaattcatgtccttaaaactgtaattacttttgtgccattcttgtaccagaaaaagatcagaatgaacagatattaacctttggaagaaaatgttgacatttaaggatgacaccaaatgactgtttatggtgctgttcactacttttttttttttgttttgagatatatttttttattgatgtgc

SEQ ID NO: 4315 - DNA, 1317 bp, Glycine max
ttgcatgcctgcagcatatgagtactcaacacaacgaacaggtgcatcatgccttcctagaatatcctctttgttagagctgaagacaagcctggagcatgataatataaagggttaattactctcccctccactcagagataaatgccctctcctccactcagaaatgcttaaattacactttctctcccgttattttaaaaataacatttccctttccatagagatgaattgtgttacattttatccattctaaatgttaactaatctctctaagatgtaaccagcaacgataagcaagcctctataaaggggcattttttcttgctgcaacttctaatgtcaccgacaattaattttggactttgtactatcaaattttggaatttagaagataaaatgtcgttttaaatacacataattttggggtaggaacttaactcataaccttcatcttattttcttaagtcccaaaacggatagttggaattcaaaactaactaatggtaaggagagtcacaaaaggagaagatttcttcacactaagacgaaataaagtgtgaagcatattaatctcttgagaaaaaaaaaataccaaatttttttaataaaaaggaaagacaatgtaatttccaatgtcatgggcagtcaactttgaacatcatgctattgaattttggactttcacaatataaatcatggtttaaacagccataactcataatttacacttcatcttctgaagtattaaatccaacagtagggattcaaatctaaactaaccaatgatatcgagagcagtatagctcattaatccatccgcaaacaaagtaacttgataagttaaaaggaaagaaaatgtaattttaaggatatatgaaggagaagagtgtaatttagttatccaggtacaaagaacaacacaactaggtcacagggtgaagaacaagacaagcaggtaggtttgaaattgaagaagagagtgagtagagtaagtgaccttctaacagtgttgtcggcggcgacactgaagccggaggaatcatcgtggaagcaacaatcgaggacgggaccagcgtgcataaactctcctctcaacacatttgcactcgcatcatacaaccggacactctgaatagaaccatcatcacaccaatcaatggaatagatagcaagtaaatgaaaacggagaaagaggagcatatgatacataccttgtcccatgaggacaccaacagatgatcgctgtgattggagaatcgaagattggtgatgccgtccgatggaggattcgacaactctcgccccgtcgcgggc

SEQ ID NO: 4316 - DNA, 1279 bp, Glycine max
cgaccaaccttgtattcctgcagctgtagttaatttgtgtgtgtatacctagccattagcattatattcattgtcgcttgaaaaaaaaaacattatattcattgggaaggtgcaatagtgtatttgaactttgaagtatatctatccaatgttataggtacgcacgcacctcatggccattgccgctgagaatatcgggtgcatcgttgcggcgagagagggaatcaactcgtgaccgtttcttgccaaagtcatacaaagactttgctctcatcacgtcatgcactgtgctccgccgtatgggaaccgttcccttaggacaccgtgtcccatttaggtgccacatttgccatgccacctcactagtactattatcattctcttctttcttcactttcatcccttttggcatctccgttggcattttctattacatccatcaaataatacaaaacttaaagaaaaaccaaacaacatttttttgggccatgagtaaagtgcaaggaaagcaaagaggtacgttgtgaaaataattaggttgttgtatgtacatgtatatatatacctggatcttgtgattctttaaaagggggtgatctaaagccagttgttttcttttgtgaatacaatctataagatctccatctggactctgcaatacaaaagaatacttactgttacatataataaagaagggcaaaaaccaacatttatgtggccattaaaatctcaaccactgatcaacgtacaatgaaaactatagtacataaataatattaatagtaataatgttacctctatggtgagcacatgaggcttattgatcttgttcaagtgcttactaatcctttcaagtctaagggtactggtttgcctatgcctcgtgtaatttagcgtcgtggattcaaccacagccttttgtagaagtatggcaacaaagaaagtgagaaggagaagatgatggtcctcacgaggagctgaacaggagcaccttctctttctcccaataataatacccatatctctttcagcgccaagaaagaaaatgggcaaaaacaaaaacgtaataaggctaggaagccattactagcaaagcaaatagcacaaagaaaatctgactttcatggttatttccatgcccaaacactaaaccgagaaaagaaagttggaaagtgacttgttaagagaaaaaagaaaggaaggaagactctccctagctatctctctctatttaatagtattaatggtgagaaggggagtagttgagatcaattaagct

SEQ ID NO: 4317 - DNA, 1053 bp, Glycine max
atttaagtaatgctcacagcatttttttttctctttattcagttgtcatctgatttccccattacattttgaaagaatgtattattcaaactttctaactggaaatcagatgacagctgaataaagaaaaacaaattccagttcatttcaaaatttagtcaaagactaggcaaaaaacaacatattacctgaataataatattaagcccacatatctgggccaaacgaaactcctccgcgtcaacacatgcaaagcaaacttccttccatgtttttgcactgttagctttccttgctgcatcaactgcaccttggaattgtttcaacttcacaagtgtaactgctaacttggcccagttagatataaaagcaaatatgattttagcagcctcatatagttcttcatcatataatcggtcaccaacattttgaagattggctacatttggcaaaagaatgaactcctcaatgtcactgagccgatcaatctttgcatacgcataaatgagctcactgtccaccttgggttcttttgtcttatgccttaccatcaacaagtatctcaccaagtcatggtaagcatttccatcttcagcagcacggataacatccaaaaactgtgtggcatcgtctgctcgtataaaggactcaatggcatcacttactagcccttcccttagttgagccttggctacctgactccaaacagcatcttcttcaactcggaaagcaaactccacagctctatcaatgctatgaatatgatctagcaagacattgactgcttggacatttaagttgaacttcttgaaaattgcaaatgcttcctcatataattgagcctcaacagccatttctccaactgctggcccatcaaaattatccagtctattaatataatccataactctggacggatcagcctttattgctgttaaaataagcagattctgaagattaaagttcccactgaatgcagaattctgaagcacaatcttctcaagaagctcaatcaattcgtgaggtagatcagcagtcatgaaagccttaaca

SEQ ID NO: 4318 - DNA, 968 bp, Glycine max
tattttacgccagtcatgcatgtcctgcagatgtaaagataatcaattaagatgagtgaattcaagcaagtaaactgggaacaaattttgactaattaaaagttttaataaaaaaaaatttaattccacaaataataaataaaaattcaaaaccactttcaccgaacatgcagtctatcacggaaaataatcaattttttcagcagaactcatatttcataatcaccccttaaatattcaattacaaagatttacaatgttccaatcggccttacctgcctcttcttggagttctctttcttcaaatactcggcaaaaaactcttttgtcatcggacaccatacttcagcacactgtacatttgcaataaatccaccttttactagatctagccaatttgcctcatacagcttgggaccaatcaggaagttcagatctgtaatcctttcatcctctctgacaagtgtagctgcaatttcaacagtcaacacctcactcttagtagaaaaggttaaggtcatggtcaaagcaacattaaactaaagcaaaatggcatacctgtgagcccaagtttacaatgagatttagtgatactaatgactttacgaaacatatgggccggaaccacatgcacctgtttatcatgccatgatattatgcataaggaacaaccttaagatttaggcagggagcatataatcataaagtcgtgtggctacctcatccatgaggagcaatccccattctctgtttcttatttcttcaatgatcttttcagattcttcagaccgcttaccaccaaaagcaaccatattatatgttgtcacaacaactccagcattaccacggaatctctctttgctatcagacgtgaaacgacatatttgttcttctcggatagttgaccatagtttaaattggaaagcccactgatctacagaaacagcatttgttgccaaacagaggca

SEQ ID NO: 4319 - DNA, 1052 bp, Glycine max
acagaactcagactccacaaaaagttctataactgactcagcctcatcacacttaacagaactacaattcagaaaatggcacttaccattacctaatgaagcgcattggtcaatcaatgttgaccttatgttgtcctctgcatcatcccttgctgctccagcaaaactgacgaggtttttgcggtttgatctaatgattttcagttgccatgagattatatcattgtctgagtgagggtggaaattagttggatgagggattccaatgtcattctcatgccacggttgtcgttcgatcaagagcttaatggggttttgcattttgtcaatctctaacaatctagtaccccaaggagagtcactgcttctcctaaaatcccacgaaatcttacccaacacaaacacatgatccttacccgaattccttttccatgttccttgtctctcaagccacttaaccaattccagagacaagctgtctttcacatcattcgatacattcttgaaatgccatcgcaagatatccaaaccaccatagaatggaacatagaagagctttgcaacattttcatcatagaccctgcatggatgcttcatgacccttgaatgaaatatgagttctagtgagtattgatgagtcttataccaccctttgccaagcttggctataggctcgcccaacccctcgttacttaaatagccgcagaagttctgccacggaaccatgtcgcgacattgacccaccaagtccttgttaaacttggatggcaaatcatatacatatattccttgagcatcacaagttgcttggtttttgcttgactttgacctccaggatcgatggagctgcaattgttcctcaacgaccttaacagcatttgcaactttgtcatctctatctttgatatctactctactactagtagtaaccagatatgagatatctggaaacttagcaggttcattagttgcattaccctgatcaattccaggagtaataatagaactactattgtttgttgtggaggttggaatttccaaggaggggtgag

SEQ ID NO: 4320 - DNA, 1135 bp, Glycine max
tcgacctggcagacacatgaaattgaataatattttgtaacaataattattatttttcctcacacattttttctgggtcttctgttggtgccaagtcagcatctgtcgtggaaggagctaaaaaaataaatagtacatgggactatgagagggaagaaaaggtggtaaggtggtaaggtgaggcctttagctttaaaaagttgttaaccacccgggcatattttccctatgccttctttgtttttccttttgaacattcctttctgctttctgaaaaactcttcaatacacaacaccagcattttttaagatacaacacaacataccaccaccaccctttttattgcatccaccaaaaactctctccttaataagcattcattttcattcatcttggttgtctagttccacaagccaccattttgagtttcatgataagaagagtttagtggtagtagcagcatcatggtgagaatctgaagaaagaaaagaaaaaaataggagttttcttttgtgttgtttgttggttgttgttgttgatccttcccacttttttttggtgtccgatcatgtgtgttaacaattacaccttttcttgccttgttgcgattggttcagggaacacctgtgaacatcatcgttggatcacaggtttgggttgaggatcctgaggatgcatggattgatggtgaggtgacacaaatcaaaggcaaaaatgccaccatcattgccacaaatgggaaaactgtaagcctttttacttgatcatgaaattggactaatgaaagtgttgccattcattggtgaaacacttggaaatttgattagaattgttcaatttcatagatgcagaaatttgctttttgactagaatggcatagctactttggatctgaatgatggaaatgcaataacttgtagaaagaattatataggatgatccatcaactgtaattttaattctttttgttctttcactggatttttcttaaccaaagtattgtgtgaagttaaatttataatattatgtgataatgctaaaacttgaccagtatttgttcttagcctggtagcagagaaaagataggtagaaaaaataacaatacaacaccaaggtgaaatttcatcacaaagg

SEQ ID NO: 4321 - DNA, 1044 bp, Glycine max
cgccaagcttgcatgcctgcaggaagtaatgtgccagtgccaaatttggagttggcagatgcagccgaggcatctgcatcaatggcctcattaggtccattggagaagggagccatgaagcctccaggaccagtagcttttgttggggaagcaaaagggctatcagggagattatgctctaaactgcatgcatttaaaatactgacaattaaatatgggaaaatgggaaaagctgaataaatgcacaatttttttatcggcaagtactgaaaaaggaattttttggtgtaaaaaggtgttttactattctggtgccctgtattctaaatgagaacaatttttataccattcttgcaaatcacaatcgtcatgactagagctctgcctgccattgccttcatcatatccatcctcgccattgaccatcacttccttgccaacagaaatgttgactgactgttgaccagtagaaactgacgcagtaccagctggagcagaagttgaaccactctctggaatcaaatagcataaatcaaaaccaatccattccattcccaagaaatacaccaagttcaatccaagagcagctgcattttaaaatgtatgagagagaaataccctttggggcctctgaagtgatgtgaaaagaaggaacaagattttggttgaacatgttaggagaatgggtgggggaaggaattgggcttccagtgcagagtgcacgctggtgatgcttcttgatgtcaagaagttgcagacccattagcctcctactttgtagctcaagagcttgctgcaaatcagcctgctcctccagcttcctcctccacagcatgtcttgagtattgtagaacattctgcctcctaaaaccatacaattaagacagtacacgtgttaagtagagtaggtttcaccaacacaatctgaaaagacaacaaaatggaaggttcaactaccaagttgaagatcaaattggtggtctctggcatctaatccagtaggagtaccacatggtgaaaaatctcctctatctacctgctgct

SEQ ID NO: 4322 - DNA, 1060 bp, Glycine max
atcgccaagtcttgcatgtcctgcagcagcagcaggtagatagaggagatttttcaccatgtggtactcctactggattagatgctagagaccaatttgatcttcaacttggtagttgaaccttccattttgttgtcttttcagattgtgttggtgaaacctactctacttaacacgtgtactgtcttaattgtatggttttaggaggcagaatgttctacaatactcaagacatgctgtggaggaggaagctggaggagcaagctgatttgcagcaagctcttgagctacaaagtaggaggctaatgggtctacaacttcttgacatcaagaagcatcaccagcgtgcactttccgccggaagcccaattccttcccccacccattctcctaacatgttcaaccaaaatcttgttccttcttttcacatcacttcagaggccccaaagggtatatctctctctctcacattttaaaggcagcgaatttcagctgctcttgaattgaacttggtgcgtttctgggaaatggaatgaatttgttgagatttatgttatttgatttcagagagtggttcaagttctgctccagctagtattgcatcagtttctgttggtcaacagcaggtcaacatttctgttggcaaggaagtggatgtcaatggtgagaatgggtatgatgaaggcaatggcaagcagagctctagtcatgaagatcgtgatttgcaagaatggtataaaaccttttcttattttgaattgctaaaagggcaccagaatagtaaacacctttttgcaccaaatccctttttcagttcatggcaacaaaaatcgtgcatttattcaggttttccaatttgcctaaatttgattgtcagcattttaagtggtttatgaataaatgcagtttggagcataatctccctgatagcccttttgcttccccaacaaaagctgatggagacttcatggttgccttctccaatggatctaatgaggccattgatgcagatggcttagctgcatctgccaactccaaatttgggactagcacattactt

SEQ ID NO: 4323 - DNA, 996 bp, Glycine max
aatatggtgtaactttaaaaaccccttgtttgtgggtgcttttaatgtgagactgtgaccgcgctttagaaagtttgaattgttttgctcattcatggactgccatgtgtttagatctataggtcttgtgtttttcttttacccttcaccttcggttcccctcacttctcagtttcatctttatatgggtctttgaattaattgctatgatctttggacttgtcttgcttggacttgttcttgttctcttcacactctttatgcatttgtcctggcattgaatttctagtttgaagaacatgggtctttgcgtctggctttgaatttctagttttttagatacttgacactgaccaaagaatagataggtgatgttttgcaaacacccagtcgtcttaaaggggccttttatcgttctcacaactttgcatttttagtcttccgtcgatgagtctgtttaaaagtcttcggcgaacaagtttagcaatgattcttgcctctcaaaatacttgggtttttaggtatgagtgatgataatgacgcgtgatttatatttgaccctttccatttttgggaacatttttctcgttgtgataatgacgttgttatcttttgcttcccttattactaactcctaccgttatatcaactgttggaagttgacttttctcaaacaaactagtgcatttcatcaagacaatctgtgcaacttcttgttagttgtttgttggttggtattttaaacgtgatgacgacactgtgcaactagctttagagatgacttttgggtcttttaaatcctacttgttatgtctgaaattcacgtgtctctcattctttagatgatagtagtacactagtacaaacagctcacgtgattcaacagagttaatgcttcggtaacacactccatctgtggtggtatcttagtatctcttcattatctctttttatgtgagtgaaatatcgatggaaaattttcttctttatatcttt

SEQ ID NO: 4324 - DNA, 952 bp, Glycine max
aatagtatatcaatgagattaaccttaagttagtgattaatcttgttagcaagggaaaattctcaaattgttatattttatcatcaaaatctaataaatacatatattaagtgaaagagtagtgctagaacattctttctaaatatattttaatattaattaaaatttattgaaaactataaaatatgaagagacttattaaataataaaaatatataattttcaataaatttaagtgtagagatatgtttaaaaaagtatattagagagtttgttaataacatttcttttttttaagtgaaattcacattgcacgaccacatgaaccattttagggaaaactgaacctaggaatatatccttgtttttgcacgggtataagccaaacaataactcaaacaaaatacccgtgattttcagagaaattgtaaacgcaacatttgaaccgggaaaaatattataaaaacttaatctgtaatagctgtaaagttccaatttataacttgctatatatttaatagtgtccattactaaattttaatgttaatttccaccccctgaaaagtatgtagccgtcagactatatatcaatgtcattgtcattacttttagagcgaattacattaatctcccttgaggtgaggtcgttagcgggtttcaaagcaaattacatacagatcgaagattttttttttggttacatacagatccaagataaacaagaagctaagggcctatttattttaaacttggataaaattaattttaaactgttacatgaaattaaaatgtgtatccaaattaatatgttgtaaacttatgatacgtgtttcattaaaagtgcgagaaatgaattttaggggatacgtatattatgaacttcattttttttttcatccaatatccctgctctctattgtttagtatttgaataaaacatgagaatcatttt

SEQ ID NO: 4325 - DNA, 1264 bp, Glycine max
cttgcatgcctgcagaaacttcttgagagtaacttcttatcagatcaggagaggttagaaaaggaaaaggaactaattgacaattatgctaatgtagttctggttcaatatggaattatactctcagtgtgataggagttggcagaccgtagatcattggaaatcttttaaaatttctgttttggcttatggtttttattgttctttgttgcagggatgttcttcgatggggaaagaacattgtttccagcaaaactaagacgaaaaaacgtgctggtgcagctgtgtataatagagcatcttcactagaaacactagtcagtgccttcaaaccatgggttctctcttctgttgatataaatcttgcacaaagtagttgtctgattcttgagaatttcctttatagttcatatatttgtttaaatctaaaatggtgatgacaactgcaagatagtattttctctgacatagatgctgcttattgttttaatcctacatgaaaaaatcttacattttggtccttacatgaaaacatgcttacaaatttgttcttactgtttgtcgatgttataactgctaaatttggttcctatacttgacaacattttttttagctcctacaaaaataattatattatgtttcattttgtttcctacatttaaaaaaactttacattttggtccctacctgatatttctcttctttttcatctgtaaaagaaaaagatttggcaccgttataattttggcaaatggcaaggacttatttgtaaactttttcatgtagggacttaaatgtaaggtttttttatgcaggggctaaaatgaaaggctaaatttttaatttaacctttttggtcccttacttttaaaagattataaaccattttcttatccatttgattcctctaatattacaagttcaccatttgactctccattcctaggagacatgtaaacacctaacagacaaagcaaatggaaaactaacaaagaaactatataggaaaggggaaaaaaattatgaagactaaattgcaacttttttaaaatgagagaccaaatgagaaaatcatggtatttaaaagatcatgtttaagcctgaaaacgtttcttatgcaaacaagtcttaatcatatatacatggacaattatgattgagtttattcaaatttgattgtgacattaatgtatgattgtatggtaaagatttgtatttctcatgagaacagttatcaccttacccgcatacacatatttccaa

SEQ ID NO: 4326 - DNA, 1053 bp, Glycine max
ttgttgaaggatttttgtgcaggcattggcatgagctcgtgtgggagtgatagtgggtgcttgtgatcagcatggttgaactccgaggtgccacccatttgtgggttgggaacaatgttggtgttgattggtaatgatgatgaaacgaggtttgggatttgttggcattgcaagtttggacctatctttggcaattgtccttcgttggctttgttgttctcctccgctagtgcgtcacagaatgctctgtgcgtaatgaagctgtctcttctgcaaaagatagatgaatgtgaagcactcagtaagtaataatgatgcatgcattaagtaaaaaaagagatatgagtttcgcgagctgcatataaataatgccaagtagatatatataaatatatatagttgttcatgaggatcatgcatgtttattattattatcaaataaaaagtggtgaaatctttgactgagtcaaataaatttaatatatatctatgtatttatagtgacttatgcttgtagaccaaaatgacttccgttgtatatatgcaaaaatattttatatagatgccacttgcttaattgtgttgattattaatcaagggctgcgtatacccttgcttattttcgtatatgataaagaaaggtttatcaaaactagagaaaaattttcaaaacagataaactaacttaaaggtatacgaaaataaattcaaagatggaaagtaagtaattccatttttttaagtcaacaagggtgtgtgtggtcaaggaaagatcccatgtaacattttatttataaaaggacaagtgctgcatgcaacttatgcactgaaaccatggatgaatattgatgagtcaaatttcatatatatatatatatatatatatgacgtagaaatttgatacatgtgtgtatgcatcaacctggaaaagatggtaccacagtcacatttgtattcccttgtaccacatatttttgagtgggctttccagtcagactgaacagcgtatttctttgagcacttatcacatttccacttcttctcgccgtgctt

SEQ ID NO: 4327 - DNA, 785 bp, Glycine max
  misc_feature (775)..(775): n is a, c, g, or t
agcaggagtacttctttgaggcaattgcatgcttactatgtcttctcttggaagagaatagattgaaccattgcctagttcatttgtcatttgttgattttctggtgctgttagagccaaaaggtgtgtagcctctttgtttttgcgaagtactagatatgttgtaccagccaaatacattgccatgcctgaaaatcctagtatcccaagaaacaccttagccacaatttttaagtgactatgaagcagcagcttgatgaagccagttattaagtagtatatattaatggccatgaggagggtaccgattatccaagtaacagccgaaatctgcaattaagaatgtaaggtaattattatgtcaaacaagatgcagaacaaccgtccttttttttttctttctgtaatataagtaactttggtgcatgaagtgcctagaattatggccaatggaagtgcacggaaaataaaaaaaaataaaaacttaggtaagggttggtttgagtgttttctgttttcattttcaaggaaaacagaaaataagagtgaaaatacatttgcttaaaatttataaaacattttctttgaaaatatttttaaaaagaggctcaactgaatacaacaaatcaacgttttcaaccttttcttaaggagtgaagatgtgatagtacagtagagtactttcttctggatacatattttctaaatcttgaaaatttgaaatgaaacagaaataaacattcaaccaacatcacttaaaaggagcgtttactgngctttatttc

SEQ ID NO: 4328 - DNA, 1168 bp, Glycine max
gttatcaattgcgaaagatggtggaaagccaataatctgctatatcatatagcggatagccggatagcatcgtgagcatgtaacagaggtcacatataatggttgaaatatttgatatatatacactatatatgtatataaaactaagttgtatgcaaataaaaataaaatacataaaattggcataatattaattattaactcaaaagttcaattggcatatgtatatagtcccaagtggatctgagaaattccgctatgcaatagcgctacaggcctatagcgcactatagcaactatttaacaacattggtttcctgtttatttttttcccaaaatttactaatttcttagtagtagtatgtgtccttgcctcttctcttttgatataatgttcaaattatgacttagatgtggacatttatcgtctcttttttacctttgacattctagggtgaagttgaagattatcaaaattccaaaaagaaagagattaaaaacttcaaagagaatctagaatcattctgggacaatttggttcgtgagtgtcagcatggcccattgtttgatcaagttttatttgacaagtgcatggactatatcattgcactgtcatggtaagtatgctatttaaaacttctgactctaggaaaatatatataccatgacttatctgctactgtacatatgtagcacccctccaagagtataccgtcaagttgcatcattgatgggtcttagtctggtcacatcatacataactattgctaatatgcttcgtgctcaaagagagactactcagagacagttggaagctgagaaaaagaaaagaactgaggggcctcgagtggattcactaaagaaaaggtcttctgatactcatgatagaatacagttgttggaggagatgatgcgcaagatatttactgggtaggagtttgctaaattaagaaactatttttctttataaaggcaaagaaaacaatattttatcacaagtattgtatttgctgtggctgtatatctaacctgtccatttaatgcttttttgaaggttatttgtgcatcgctacagagacattgaccaaaatattagaatgtcatgcatcgaatcgttgggtgcatggatcctgtcatacccatcacttttcctgcaggcatgcaagct

SEQ ID NO: 4329 - DNA, 1126 bp, Glycine max
gacgtgataggatgctcccgagtctgggaaccaagtgctactagttgtaggacatgcaccaagtattccagcattagtaatcatagcactaggaggattttgagcttgttgttgaggctgatatcgctgattctgccgaggaaattgcaactgcctgggcatgattacccatggagtggcagaattgggatgggaaaactgttaggctgataaacaccatagttctgctgtgttgccatgaattgagtccaagggttcgatgaagtctgaaatccttgaaaattagctggaatttaaggttgataattctgatcatagcgatgataacaatctgaggctgggtgactgtacttgaaacagacttaacattgcacattaggaaaccggtctccacgaccacggctgccaccatgactgtttcggccaccgtgacctcgtccagagccacgaaaactagaatacgagttgtagttcgaattcacaggttcagaagcagcatgagcttgactagaagaggaagattgttgttgcaaacctgaggaagaggttccagtgaggtttaatgaagccgtttcagaggcgagcttcttatgtcactttttgagtcgcatctcattcacaagaaggagcgcttcaacttcctcaattagcattggcttgaatttacttttgataaccgagttgtaattggaaggtagaccttcgagaataacatcaacatgttgctccagtgtgatcggatcttcgacagaagctagtgcatcagccaaagctttgatgcgcagaagaaatttcgagacggatttgttatcaagagtagtagatcacaactctgtgcgaagtcgacaaacttttgctttagttaacttctgattattattgtgaattttctcccacacttgaaacacatcagcggaccctagaatgcaagatagaattgagctagaaagagatgattgaagccacgtgaggagcatttgatcttgtatctcccacgcagtgcacgcaggattcacagtgcctaaatcctgatcagcttcactcgcatatctgagaggaatgttcggacacactagatatctgtgtaattgatgcactttgatcactggttctacttgctgcctcc

SEQ ID NO: 4330 - DNA, 936 bp, Glycine max
atgctgatgatactgtgttctttggagaagcttccatggagaatgttagggctgtgaaggtcattctcagaagctttgagatggtctctgggttgagaattaatttcactaaaagtcagtttggtgccataggtcaagctgatgggtggtgcaattctgctgctgcttatcttaactgtgatatgttacagcttcctttctgttacttagggattcctattggtgtaaatccaagaagaagggtggtttggaatccaattattaacaagattgaggcaaagctgagcaaatggaaccagaagaatatttctatggctggtagaattactcttattaatgctgttctaacagcattacctctgttttttatgtcctttttcaggatcccctcagctgttattaataggatctctgccattcaaaggcaattcctttggggaggtaatccagaagggaggaagattgcttggttatcttggagtctttgctgcactcctaaagataagggaggtctggggattaaagatattaaaaccctcaataaagcacttcttttcaaatggaaatggttgctgttccaccaatcggatcaactctggaacagaattctggtatctaaatacaatggctggaggggattgggccggggacctcacaaacatttcttttctaacttgtgggctgacttaagggccattactcaacatcagagtatgtctgctgctgataatcaaatctgttggaagttgggtagaggtgatcaatttctcttttgggaggatccttggggcgacgagggaattcctcttaaagatcaatttcctgagctgtttagagtttcttcccaaagacattccaaggtggctgagatgggatcttggactgagaatggttgggtctggaacctgtctggagaaggaatctcttcgataatga

SEQ ID NO: 4331 - DNA, 1208 bp, Glycine max
aggaactctggttggcagccacctcctatgagtctttgctaaggcaaaaagcaaggacaaaatggatcaaggaaggggactgcaactctaagttcttccatatcacagtcaatgggaatcgcagacacaattcgctcagaggactcctggttgatggatgctggacaaaagaacctatcaagatcaaagaagaggtttgtcaattttttaggaagaaatttgaggagggtgaggaggtgaggccgaggcttgatggggtaacttttcaaacaatttcacagaatcaaaacgactttctggtacatcgttttgatgagaaggaagtaaaagatgcagtgtgggattgtggaagtcataaaagccccggactagatggtttgaacttcaaatttatcaaggggttttgggaagtaattaaacctgaggtgcttagattcttggatgagttctacgtaaatgacagacttccaaagggtacaaatgcttcattcatagcactaatccccaaagtaccggaaccacaaaacctcaaccagtataggcctatatctctgatagggtgcatctacaaaatagtggctaaagtgttagcaagaagattgaagagggtgctgccaaagatcatagacgagtgacaaactgcctttattgaggacaggcacatgctacacagtgtcctagtagccaatgaagcggtggagaaagtaaagagaggtgctaagagctatttggtgttcaaggtttactatgaaaaggcgtatgattcagttagttgagattttctagtatacatgcttaggaagatggggttttgccctaagtggattatgtgggttgaaggatgtctcagatcagcttctatttccattctcattaatggtagccctacaactgaattcaccccacaaaaggatcttagacaaggggacgacccattagcccctcttctgttcaatattgtggctgagggattaacgggtctaacgagagaagctctgaaaaaaaaaatcaatttaagggtctcttggttggaagaaacttggtgaaaattagtatcttgcagtatgcagatgataccattttcgttggtgaagcatcgatgcaaaatatgagggtcatcaaggcgatgctgaggagttttgagatggtgtcagtttggggcgattggaatgtcaatgcagtggatgaaggaggctgccccgtacctt

SEQ ID NO: 4332 - DNA, 1200 bp, Glycine max
gtgttcattgacaaaataacattaaatttgatagttttacatgccttttacatatcattttgggaagagttataacaccttagaagaaaagtcttaaatttatgctgattgcttatgtagtgtagtaattgatttgcctatatacttttgcttcctcaggtatgattctcgggctggattttggggtgtcatgggtggaccatgtcttggaataattctggtaagttattctagtctggcacattccatttctcacatgcatataaattaatatgttagtttctcttgcagccattcatagaagagttccagcatcccatgccagataaatgtgctggtggaaataccagtgtttatgtaaatggtagagaacttcaccaaaaagatttagatttgctttctcgtagaggactccctcgtgatagcaatagatattatatcgttgaaatttctggtagagtcctggatgaagacacaggagaagagctggatagccttggcaaacttgcaccaacgtaagtgctgagtttctgatgattctgtttcttatgttttaatgcccttgcgtttctttttattagttggagataataaaatgctggttacctattattagcaacccatgtttgttttatcctagaagtcaacatatttccaattgcatgtgatcttgaacatatagatcaggtgcaatttttccccataactgcttgcctcttttagatattttgacatagtgtagaggattcctaggttaataacaaacaatgcaaatcaacatgaatatatctgggacggggtgcatgattttgttacaggcagcctgccacaagagtttttgcatcactttggtgtgctgtaaggaagaggatatgcttaagttgttgtttccactactctctttgttgaagattttaagtggaaatgaaaaaaaaatagagagcgaaaagctgtgttttctggaacaagtgttgtaggattaatttcttaatacatttatgatgtataatgatcaatctgcccagtacttgttatttcaattcggggtatcaatttgatgattcaacagatgttttctgtaaagattgatatttcaagccgatttcagttgttacttttaccccttcaatgaatatggtctttgcacttgacttgttaaataattttcttcccattacataatttactaatctttaagaa

SEQ ID NO: 4333 - DNA, 1062 bp, Glycine max
aattttgttgatttggcagggagtgagcgtgcatctcaggcattatcagctggggccagattgaaagaaggctgtcatataaatcggagtttactcactcttggaacagttattcgtaaacttaggttgtccccttctttcttagcctatggtgtctaccttctttattcagcttttaatattgttagcaaacctacatccggattgtttaattcaactgcaagtcatatggatgcctgcctcttattttattgttgattaattaatcatatcttcattgtttatgacttcacgacctgtcaggctacaaggttaactttgtgttttctatgcaagaactgactagcctattttttcttttcgctactatcggattgaaattattgatgtcatcataggctcataccagtaagatagcctttctttcagaaaagagaaaaagagcattaagatagcctttttattaattataagacactgagttccttttatagggttgagtaggattaattagccatttagtccctatagttttcaaacttttagtccctgtaattaataagtgtgttttttattccctgaagtttatattttaattcctaaaaggtctctgccgttaaatttttttaattaacagagttaaaaaaatttaacagcaggaaccttttgggaattaaaatgtaaatttcaggaattaaaaaatctacttattaaacttcaaggactaaaaaattcacttatgaactataaggactaaaaagggtaagtttaaaaattataaggactaaatggataattaaatcggttggatattagttaatgttaacttcaccagtaaataaaaatttgggtgaagaagcaagccggatattcatattatgtacctcgtgttgtgactaattagagagatcttctcactgtaaacttatctgatgggctacactttctatgaagctgttcaaatgtaaaattcagtagtttctgttggctgacatatgtgcttggatgcagtaagggaagacaaggacacatcaattatagagattctaagttgacacgcat

SEQ ID NO: 4334 - DNA, 998 bp, Glycine max
gatagtcccacattggctgattctttgcatgcagatgttacgagggaaaaagaagtaaatatcagttactatgacttttccttttccttttttctcttttcatttttctgacttgtgaatctgattgtatataacttttcatgtcattaaccatgcttgtcaggattctaataagagaaaaaaggatggctcaacatcattttctctaaggaagaacataatatcttctattgccggtgaggaggataaaggtggtaaaacctcaaggtagctgagaaaacaagcaactcgtaaacctgcaaacagttcattcaatgaggatgttgaagataataatgaccttgacgatgactatgaagtcgataatccatccaagaaaaaaagagtatcaacaagttcacagaagaaacttgtggctaaaagtggaaaaacatctcgaaagcgtaagaaggctaatgatgatttagaaaagtctgaggaacctcccaaaaagttctctcattcaactcgatgaagaaaaaggtgtggtagaacttactagacaaggctctgctggaaattcctgaagaaatttgtgtttaatttttcagctttggttatatacttatgcaaaagattttctttttcatagtggacaaggctctgctggaaattcctgaggatgaacttgatctacgacaaatacctattaaggatactattttacttgaagaacatagggagcggctggcggtgtgtatactctattctaatccttgtgttgcaatgtctaacaattgttagtctcatagtatgacactatggcttaaattttcaccaacctttccatttgttttcctatgtagaaaaaagaggcgatgactttatatgtcttccaccaatcaaaggtactctgctttagtaagagtttacatttacactggctgttgttactttttaccgtctcttttgattgccatgtggactagtaaataaatttcagtttgcataatatttat

SEQ ID NO: 4335 - DNA, 1155 bp, Glycine max
ataattcgacattacatttgtcttaaattctagggcacggaggctgaggtggttgaaaagcttaagcaactggagctaagctcaaattccaaaaatatctcagtcttggggaaggcaataatggatgcttctgctgtaaacccgtcattggtatttctcttgttatcatgatcattcttacctttgttgctgtttgggacatgtatttgacatgttaagtataagcaattaactatgacttggatttcaaagattagtgtattttggaataatttatgcttagcctcaaattcaaatggcacacacttatattcatttttttttaaaattattgttttgtttcatagaaaaataatttccttttgacatacaattgtttttttttgacacacttatattcaaatggcacacacttatatttttacttgagattacagctgatcttgaatgcttcaagaattatgttatatctttcatcttaagtttttgtgataaaattgtgagtttttatttcttatatcagactacttgctgatcttgagcaggaaatgtggctgaaagattctgtgcttgcattatatccagatactaaagattgttctccagctctagtaagatcagttattgtaggcaataattaatttatcattttgaatttgaacataaattgcttatggatgcccatttctgtaggccaatttctttaatgctcagcagaaattttctggaagcaagaattctaaaggagctcaacaaatgttgcccactatatgtcatagacctctatcctcatctggttccttagaacgtagagatgttgaggaatctcgctcatacatgagctcttctcctaatctagggtttgctgtcaagcagctgacacctactgatttgaggagttcattgctatctggaagaaatgaaacaggaagcaatcctgttgagtctcctgttcaggtgaaaaggaaccttggtagtcatcgcaattcaggaatttggcatagttacttccctcaaggacacatatttgaaagaataacatacttaaccgtattgggttgtattgcatttgctagcattaagttgtcgggaattggtcttagcaagactcttactggttctcattgggcttctactaaagctaatgataacatt

SEQ ID NO: 4336 - DNA, 1179 bp, Glycine max
ataacccgatacttctctagagtcgacctgcagaataattcagcattacttttgtcttaaattctagggcacggaggctgaggtggttgaaaagcttaagcaacttgagctaaacttgaatcccaaacataattcagtcttggggaaggcaataatagatgcttctactgtaaacccgtcattggtatttctcttgttataatgttcattcttacttttgttgctgtttgggacatgtgtttgacatgttaagtatgtgcaattaactacgacttggatttcagagattagtgtattttggaataatttttgccgagcctcaaattcaaatgccatacacatatattcatttttttaaaatttctattgttttctttcagataaagattttccttttgacagaaaatacttgtgtttctggcttcagaaaaatatctatttttttgctatatttttacacaagataatcgctgatcttgaatgcttcaagaattatgttatatctttcatcttaagttttcgtgaaaaaatctttagttttgatttcttatatcagaccacttgtgcaggaaatgtggctgaaggattctgtgcttgcattatatccagatactaaagattgttctccagctctggtgagatcagttatagtaggcaataactaatttgttattttttattttgaaaaaaattgcttatgggtgcccatttctgtaggccaatttctttaatgctcagcagaaattttctggaagcaagaattctaaaggagctcaacaaatgttgcccactatatgtcatagacctttatcttcatctggttccttagaacgtagagaagttgaggaatctcgctcatacatgagctcttctcctagtctagggtttgctgtcaagcagctgactcctactgatttgaggagttcattgctatctggaagaaatgaaactggaagcaatactattgagtcacctgttcaggtgaaaaggaaccttggtagtcatcgcaattcaggaatttggcatggttacttccctcaaggacacatattcaaaagaataacatacttaaccgtattgggttgtattgcatttgctagcattaagttgtcaggaattggtctaagcaagactcttactgcttctcattgggcttctactaaagccaatgataacatt

SEQ ID NO: 4337 - DNA, 1183 bp, Glycine max
tcagccatggccaaaaatcgtccatcagatgtgaatcttagggctcttattgcacccattcttccctttaacacagccatagactgtgaaagatttcttatgtcccacaatctgcatgttttgtcctgattcccagtggccaatatttgtccatctgggtgccaagctgatgaaaaagagtagtccaagtgcccttttaggctcccagtaatctgggcgataccataagattatataatatcagaaatcatattaaacattaaggacgataaaacctttaaaacaattgcaaatcgaagatacctttccggtgttagcatcagctatcaagcactcagtactgtccccaagaacagctaacaactttccatccggactaacagaagtgttctgcaaaggccaaaatatgtaaacatgactgctattttccaaaaaagtgttttaagagatgaagactatagtaacaggaatatttatcagttgatgacactcacattaacagaccaatcatacttgaaacaaccaagagaagcaaaattctctgcatcaaaaacccgaacttggaaatcattatttgctgtgatgaccctcaatgacccactgcaaaagtgaaggttcagttacaaactaaactaaaaacaaaatttcaaacataaagttctgcatttagctgcttacgctggattgctgtaaacatccacagcattggttatggcattatcatctgtagttattttaccacagaatagaactccaggatgtttcaaattctggtccaaaaaatttcacacgcattaaaaagggggctttcatatagttaattattagattgaaagaaataatgatcaacgctaccttacatataagctcaccctggaaaccacctgccaccatcagattttccttaacagtcatggtgcttatttgcactctggagacaggttgagctaaaaatccaggacgcttctacataagaacagaataacactcatatccaatgcattgagtacaaatgaaaaacatctgattaactaagtggggctacgtacaagggttggaataattggtttggctacgttaagcacttctttaccccttcgtagtaatgcggaccagtgcatcactgaatagttttgcataaagtatacatcatgcttcgaagttgcccacaacaaattcctca

SEQ ID NO: 4338 - DNA, 1099 bp, Glycine max
tacaacagatgttgcgtcaatgatgtaatacgcatacaacaccatgaaagttaggcaatctttaatccttccagtttggcagaggttattatgtcgttttttttttatcggcaaatattagtttgttagttttgtaggaatatggctggtaagaatttgaacctgcaacctctccctccccccttaagccctctttttaaccattaagccaaccttatatctcctaaaggttattatgtcgtatatattcaaactggttggctgccaagttttgtagaaattaaattaatacaaattcatgtaacaaattatagagcatattattcgtttcttctggaatttggcacgagtgtatcttttccgttagttttgtacgatgaaagagtaaattgagttatagttcatatatgatataaatgttatctttctttaaaatataattgcaaagttataaatgtacaaagaaaaatataatttattataaaatatatatgtataatttattttaaagcatacataatttactcatgaacaatcaaaatatattaattaactatatttaaaatattattatttctatggttttaataaattaaaaattaaattaatttttgaacatataagctataatttaaatttatgataaatcattcttttttatgatataaaggggcaaaagcccaaaacaattacgttatcaaagctgaaacatcagccataaaaaatgaaacagcaaagacaggtgcactaaagaggattatccctggatccatcgaaagaccatgcctagcaaaagcattcgctgcttcggtagattctctaaagatatgataaatcaatttatattgtgatataagattttttatatatattgaaatttaatgttgaaacattaggcaattagaaaaatcaatagttgtaccctttggaagcctctaactagtttctcttatacacccgtcggacacattaacaaatctgtgtctcaggttcttctgtctcgtcgagattattcgattgtcttgatttcactgtcttcccttccagcgcgcccaatgttctgcaggtcgactctagaggaaacccgggtttgagccaa

SEQ ID NO: 4339 - DNA, 1041 bp, Glycine max
ttgcatgtcctgcagcacttatttcccctcgttgagaagtgaataatctgctcagtaatgtgcttctgacttgaaaggggtcgtaaagtcgcccatgaaccatagaatgcttccgcaggttgtgcagaaaaaccgttattgctaaggtctagtaattgcaagttctttgccttaccaatagcaattgaaaactgttgcgtgaaatggcactcgggagatgaatttctttgacatgaactgacacagctgtcgtcaagtccagatgcagctgcttctactggaatatcttcattatcatcaactttaatagtatcaagtttctgctcctggttttgtgagcagctttttaccgataaatcatattgtagagaagaaacttccgttggaacagaattatcagcaagattaagttcctcaaggcagctgttctctgataaaagaaacaacatcatcaaacaattgaagatgcaaaaaatgaaacaaccaaatataatttaatgcctacctgccagagcctcaattatgtgaagaattccagcaagcccaagttgacactttttaaggaccagaacttttagacagcactgtgggtttacgaggagagcaaataaagcattgctgccctgtattcattagagaatttgaacaaaccatggataagaaactggttaaactcaaaattatcaccaaaatgccacagctatacctaaatctataaactgcaagccagtgttttaagggtaaagaaatagtatgaaaagccagattctattttgagtgttgaagtaatacatagtaacactcaaataaaaccagccaatgaagcatgcattacaataatattagcaatagaaatctagtcaaggcaacaaacctcaggcatgataggatttccttccaggttcagctctatgacagaacaaaaaaaattaacactggtgtttaaaacaaagttaaatgttagaccacaatatgataggtcaagtttcacaaactcttcagttcctttgagcaatgattctgctaattttgttgctcctt

SEQ ID NO: 4340 - DNA, 1264 bp, Glycine max
aatttgccatcaaagtcgtcctaattttctttcccttaatttctccattattgtcaaggaaataggtttggcatgtgtggaaattaaaagaccggttatgatgaaggtttaaggaaagactttgaaataatttgggacaaaatatgttcatttgcaacaagaattttgtccaaaattcatttcccatctgaaatccataaaaaatttatcataatctcacataaattaataatttttattacataatagaatattaaaaaagttactaccgaaccacacaatactagttttatttttctccaacttaacatctagctagctagttaattgctagaagaaaaactaacaagcaaaaacaatcacaactcagaacaactacagccaaagttaatccggtttagtcattgatccggttaaagtagtaggtcactgatctaattcatagaccaataactagctcgatttgatctaatatatatgtataaaaaaaatcaattatatctgtatatatgatatatagatatataactaacattaattgattaagaaaaaatcattcatacttaaaaatctaaaataacaattgaagtattaaaattgataacacaattacacaagtctcaattttttttaacgtttattttttgttttcttttttatgtgaaacaaattttaaaaacgagacaggatcgtcgaatttacaccaaccggaagggtttgaccgggtcattccagatcaaatgcatgatcggttcaataacgaaatcggcccggttatatcatcagatctcaattggaccgatccgagctgactaggagaaccggatttttaaactatgactacagcaataccatttgagaaaccatatatagatgcaaacttcttgcttatgcttttctagtcaataatacggtgacattgatgaacttagtttgctccttggacatacgatcagtcaagatttgttggtagcggctaaaaacctcttcaatgatagcttcaccaaagtggctaacaagcattggttctgccacagccctcatgcactgtgccacattgtatccgccatcactaagtgtatcagacctttcagattcaaattcaagagcgttccagtcatcaaaagcattccaattcacttcagacacctctagacgattgatggcaaagtgaaccttctttaagaacttccaatttcacttcagatggagatggagtgtatagaggaatgttaaaagtatctaatttctcttcttttatgat

SEQ ID NO: 4341 - DNA, 1176 bp, Glycine max
attatggtgcacatttgtagcactattcacatcctgcaataggtcattataaaactgagggaaatttacaagaagaatagcacgagtattcaccaaataataagttagaaaaagatctatgaaaaggtcactgacttcaaactcgatgaagcaaactgtatgcctctcctgtcttaaaatcttcatttgcttaaaaccaggttgtctgcgacacaaagttgttcaaaagattttccccatacttgagagcatgaaaacagaatagaagaaccactttcaagggataagatgtacttacacgctgaaaaggcccctcacttcttcctcgtttatgttctctcccaagttcccaataaacagggtgttgcaaggagggttatcttttgtgttctgtacaaaacaataaagataaacatagtaacacactatgttacttatcatgtatagccaactctaaagggcatacacagagagttttaataaattaaacatgagataacatagcaaaacaaaaaataaagcaagattagaactcgggtaaaaacccatctatcgattttttattgccataagatgactcgatacattataacaatatgtatagagagtaacagttaagcgaaggatgacctgaactggaacataagtgctaggtgctgcaatgggagcaggagtgggcattggtacaggtgcaacgggatagcctgcatatggatcatatggaggcggcggtggcggcgccatgtatccatgtggtccccacacaggaggcggaggaggatgaaaaggagacggacttgtatagccagtgtgtgtataatccccggctgtccttaagcgtttactttgatcaaaagcacccgcatcagctccgattcctacaagacaagctagggtttcagttacactttcacaataagcattaattaatttcaatttgaataaattccaaacctcacctcttttgacgaatagatttttctttgccatctcagtatggaggacggacttggtgtcgggatcgaagagcatgtcctgaagaatgtctttggcggtgagtgcttggtgtggtgcggagaagagagcaaaacccattggcttctcagctttgaaattcaattgagatgcttcgaaaccgggcaaccatctcagcagattctgcaggcatgcaagctg

SEQ ID NO: 4342 - DNA, 1260 bp, Glycine max
tgagaaggaaagtgacgatgagggttccaaactgcgtaaatctgctctggaaagattggagaaagctagtgaagagtcacttcttagccaggcaagcataaaaggatactttcccttggggggttggggtgggttaatttgcaatttagatgttagattattagtgaagttaagcatctaactctgcacatattatgcagatttattctcatgactttgctatgaattagcaaatatgccgattttctagtcaccatctcttttgctcatcttttattgttttacactgatattttttctgctgagtgattgttgaaacctatactatctagcttcttgaatatgctcctataggtattggctcttataagtttggttttttctcatgattgtcgtgagttgtgatttgttagtgacattgatggtgtaattctgtcacactgttctatcagggaaaaataataattctttatttgtgaatgcaaattgtattcttttaggtagactgtactcatccattaagcacttatacctgatctccttaatgtgtgtagggtttgaaggtttttgataactctgtggagacttttgcttcgggggcatggagtgctttaggaaatgcatggagagggggcactgattttgttcagcggtataattcattgctttatttatttatttacttttacactgacccacatgggggttcttctgtatgtctagtcactgatcattgttctgatggtgatatgttgatattttgaaggagataaacatctatgctacttgaaaatatgtaactagtgtcagtattgtattatgctattttttaaaagtgaactaagtaatgggccaacatgtgcttcactttagacaaaaggacctgcaaactactactgtagttaatccttgtatggagtagttaataaattgtattttaccatcttttcctcaatagattccacgtctactttgtatttattcttgttcccatcttatatgtttactcatccatcatgttacctcatctacaacactgagcttatgctcttgttgtctctttactgcccgacattcaggattagagtgctatggatagatgaatttagcatattatttcatgctgttatatgattatgggataaattgatgtctgtgttttggttgaggatggagtgtggtatcttgtgatttgatgtggatggatttactcagtgtagttcgggttatttcacccgcaggcatcaagctggcgaaaca

SEQ ID NO: 4343 - DNA, 957 bp, Glycine max
tgtagtcgtagtgatatagtattatattgactgagttattcgtcgatcctttgtaagactttctgagaacaaaggcaggtctttagtgggagctatcttgtctaaagttgtacctgcaacgttttccacaataagttctttttctaagttgatatggcgaagtgaacagtcgtctccaaagaaatcagatcagaagcctcagccatttgctcgaggtaagtattaacgcccattatagtgtttcccttttaatcaatggtcaagtagcattacacggggcttttgcatcagtagaggatagaactttttgactaatacatgtatatctactagtacccatataatggttccctgtcagactagttctgtctgattctggaaccattcctatggtagtcatactgctgtattatagtacctctggtactcctttccatatttataaaatattatctttgctgataaaaaaaataagtacacaggctcctgcagatatttgtgtataatagggatgatgatcaaacctagtaaaaggaaaagaaaattatatattgtcttgctaaataggactgttttaaacaatagaaaagtggtgctatgatattttaactataggcttaattatgtttttagtccctcaaattctaaaaatgttcattttaagtccctcagctcaaataaaacttagcattttttacaattgaacttttggaaatcatgaagcatgaacaaaagaggtaacaagtaagcttcctgtcaaaattgcctcttccacagtacaatcgaacctgccttgtgctgttcacaatgacatatactaggatatatatgtttttctacttttctaaaattgaagcacagataagctaacctgtgttcatcctctgtactgcattaccctttcgccgttctgatctgatcttgagccttattccctgatactttattgttactatt

SEQ ID NO: 4344 - DNA, 1205 bp, Glycine max
atcttctatcgccagcttgcatgcctgcaggctgaattgttaacagtgtccccatcatcaattaaaattggggtccatatcctgatcaaaagaaattggaaggagataccaaaggatctgtgatataaaaaaagattctaactatggtgccactgccaccaagaattctttatatatacacccaagtaaaaaagcttttactaccctgttaataagtgaacacaggaaaaactcaagattccatactagctatggcattatcaaacataggcatcttggatctccacatgtcacgtttcataaatggctgaaagataataggtttccaagaattcaaaacacttgggacattaaaatggtccacatgccaaacaccttgttggaagaataatgagatgagacccatgatgcttaaagggtggtttctaattgcagattaataaccaggaaaattcctgggattttaccttccagataaggatactgatatcgaactgagagtttcggtatccagaaactggggaaatggttgcacccattgctatttcactgttgacctgaataaatcccgagcaaagaagattgtagcagccagtagcttgatatgcatcactctgcaaaatacagcaagtgagtttgattataaaaaaaatatttttttttactaagacaaacagtagaacaaaaaaagaaagcctcatatgtcacgcaactacgcaagcttataacattagaagcttaccgtccagtaggtgaatagccgtgtgttgttatcaccgtataaatccgggctaacctgttatcatgcacatgaagtcattacaatttacaatcatagttctgagtcaaagacaggtacttagattgcacacttggtatgaatgaaataatgactattatttcttagtacctgccagccagcttcgatactgttaagatcttgaccaaatgagcctcctaatatccaaagctgagacaagctgaactcattagtctgctgaatcttgggttcccacacatttatagtggcttttgctccataatacttgtctccttcaacatatgctattgcatgctgattaacaacaacacacaaaaacaccattaggaaattggaccaaggctactacttaaaaccagataacattacaaggcacttgaaacagttcttacctgatgaccactttggttaattagatcaggtt

SEQ ID NO: 4345 - DNA, 1285 bp, Glycine max
acttaatagtcaaatggaagacaccgctcaaatcactcaatgtcatccttggtactctctgcctctgtgcaatgtaaaacacaactactcggtcaaaactcaaattctcccccactaaaatgaaaagatcaaaacagttactccccactaatgcaaacacaacacttcttaagaaaacaataaaatattacctgaactgccatatcacgtcgtctaggcctagaagttgaagcccttcttccattcccagcctcaggttcagactccgactcttgctccgtgccatttgctacaaacataacgattcaaaactcaacataatgattgtagaatgaaattgtcaatggttgaagaaagaaaatgtgacattaatgaaagagatgaagaccaacgtggacccaaatcatcgtctacgtcattggaaacttcagtccaatccattccagtgcagagggcatcataaaaggcagacatcgacggatcttctatgggaatgaaccctgcttcagtcctctctttacagtaaacatttaggaaattccttatttcttctgtgtttttattgcagaaactgataataattgcagacaaaaaagtaattaaaagattgacaagtagatactaaaacataaaataacaacgaaactttgtttgcatgcatgcaaatagtagtagcaatgcaagacttagaagttagaaaacgtactcgattatttgataagtgtcccttggaggacgattcgatgtcttatcctcaacgaggcatattgcgtggttaatcaccccgactgctccatgaatctcaagcttgtcaaacctaacacctgcgatatattttaaatttaaaacgggaaacaaaaattacggtggaaaaattaactaaacccggaataatatatagagttgtggacatttatttatctatatggttattcaaaacttgacatagaaaaaatatttatctatcaccattggtgtaatttatttgtctaagaacttcacagcaactgcaagagaatggctctggtggtgggggccaagaacaaagtgacctcacatcttggttatttggtggctgagtttgattctcttgcgggggatccacgttattaccaactcctccttctccaaagaaaaaaatgtcatggccatgtatgaagaatcgatcaccttgaccttcggggatcggttccttacccgtcctcctcggtggaccctcttcctcctccacatcaacaacatcaggaactactccttctccaatgggaaaatcgttattattctt

SEQ ID NO: 4346 - DNA, 1096 bp, Glycine max
aaccctgcaagagctaatgtactggccttatttctctgacagatttcacatgcagcaacatagtcccctatagttttcttcattcattgccaaaacatcacattagccaccctcttgaaggttcaaaaaaaccctgaatgtcctcccaaaggggaatcatgcaattctttcaaaagtatagggattctagtggaatttcttgacaaaactagtctatccttgaagtatagtttacctccatgaatggtatatccaggcttctcttctgttttagttagaatcccttgataaattccgtataattgaggatcaacttgtatttcttcctcccaatcagcccattcctcctcttgcaccaacgaaattgctgaaaatgaaaactgcctggatagtgcatcagtcactatattctccttgcttggtctgtactgaatatcaaaattataaccaatcaatttagtagcccacttgaactgttcttcactcataagtctctgctcatttaggaacttcaaactcctttgatcagtcctaattaaaaatttcttacctagcagataatgcttccatttcttcactgctaacaccattgccatcaattccctctcgtatactgacttgagctgagccctgtctgatagagccttgctccaaaaagctaaaggtttctcttcctgcaataaaatttcccccagttcagttcttgatgcatcagtttccaagataaaacttttagaaaaatctggtagtgtcagaataggaagcttccgcattgctaccttaaactcttcaaaggcatgagttgcttcttctctccaatggaatgcatccttcttgagcagtgcactcaatggctgtgcagtttttccataatccttcacaaatctcctgtaataccttgttaaccccaaaaatgctcttaatcctttggcatccttaggtctaggccattcagccattgcttctaatttactagggtcaacttctacaccttttcctgaaatgatatgccccaaaatattccaaataattttgaccaaaattgcatttttttcttgttcaccttcaattcatgttgctgcaggcatgcaagctg

SEQ ID NO: 4347 - DNA, 1060 bp, Glycine max
aacatgaattgaaggtgaacaagaaaaaaaatgcaattttggtcagaattctttggaatatttggggcatattattttaggaaaaggtgtggaagctgaccctagtaaattgacaacaatggctgagtggcctagacctaaggatgctaaaggattaagaggatttctggggttagtagggtattacaggagatttgtgaagaattatggaaaaattgcacaacccttgaatgctctgctcaagaaggatgcattccattagagggaagaagctacttatgcctttgaagagcttaaggtagcaatgaggaggcttcctattctggcactaccagatttctctaaaatttttatcttggaaacgaatgcaacaggaactggactaagagaaattttattgtaggaagagaaacctttagctttttggagcaaggctctatcagacagggctcaactcaagtcagtatatgagagggaactaatggtagtggaattagcaatgaagaaagggaggcactatctgctaagaaagaaattgttaattaggactgatcaaaggagtttgaagttcctaaatgagaagaggcttatgagtgaagaacacttcaagtgggctactaaattgattggttatgattttgatattcattatagaccagacaaggagaatatattggctgatgcactatccagacaattttcattttcagcaatttcgttggtgcaagaggaggaatgagctgattgggaggaagaaatacaagttgatcctcaattatatggaatttatcaagggattctaactaaaacaaaagagaagcctggatataccattcatggaggtaaactatacttcaaggatagactagttttgtcaagaaattccactagaatccctctatttttgaaataattgcatgatgcccctttggaaggacatttggggttttttagaaccttcaagagggtggctaatgtggtgttttggaaaggaatgaagaaaactataagggactatgttgctttatgtgaaatttgtcaaagaaacaatacaatagct

SEQ ID NO: 4348 - DNA, 1084 bp, Glycine max
cacaagggacaaataaaatcttctttcaaacaacagaaatgaaatgttagataatttttaagaataagctaatatgttaattttttgtggtggagtatataaacaagcataatgctgatagtaagtagagtcacacaagcatttgaactagaaactatatctgctcttttgacacatagaaggtacaataataagcatagttgtattgacgtgccaagttcatctaagagtgtttaataattcggttctgcactatactgaaaaaattctgaatggaaattccattttgaattcggtgctaaaacaaaaataagaaaaatgatgctgaattcaatcagcaaattaagaaattgagtaaatcaagggattaatcaaagtgagaaaaaaatttaaatatcataggatcttccactccaatgcttatgttatttggaactaaaagttcagtgctaaatctgcacttggggcgtattagggtaaacaacttgagtaagcatttattcactaaactcttatcaaatgagaattcccatataggcttggttacagagcttaatgaaataagctaaaaagagcttattttgataaggttcatagttaagcttattgaataaactacaaatacaaagggcatatagatagatgaataagctactttcatacgcttaaacaagcccttcagaatgctcccttaatcatagaagcagagaaaatgatgataaaaatggcattatttagctccttagtcgttattcattcaatatttcactctcagttagtataagtccctttatgtagttttcaatagtttgctaaatacccaaatagtgatttaattctgtaaagttaaagtataattaagcagcttcatggcgtaaatcatcacaccgaaaaaatttcacccataatgagcaaataatccaatgaatcaaccaaaagtatagatgaaagctcaaatattttgccccctagccctcaaagaacatttttgcattttagcagatcgtagcaaaattcgctgaaaaggctggaaaagcagcattatgaattcacaaacataataacaaagtaacaaatagagcta

SEQ ID NO: 4349 - DNA, 1166 bp, Glycine max
ttgcatgcctgcagtaaaatctatttctgatcagaatctgtaaaccagcaagcagaagtgaaattcaaaacccatcaagctctaattaaaactaacatattgcatgtcaataaaagaaaatagaaaatagaaaacagaaaaggtcacgttttttttatcagttagatagatatatattctctatttcctgtccccaaatctgcaacttggaaaagtttgagattatcaaaccagaaagaatggcagaaatcagcaaaagaaactattgataccattaaaaaaatacggacattttaatttagtattcaaaaataatttccatcaaggatgatggcagtttaaagactacaaagttcttgtgacaataagctattattggattcctagatacactcctgcaagaaaactataaagcatggggcaatgttgctttggatctacctattcaagcaacattagtagtagtcatgtttcgaatcatcagtcaaagctaattattgtcacatctaaatatacaggacttcagcccataattttcctataattatcaaatgaaaacatagacaaaatgttagaacacctattgctatagccatcaacatacatcattaataatttgattcatatgttgcaataaaggtgcaccaagttaaaaactacccaatttatattgtagaactcccccccacccccaccaaaacacccacacatacacaccaaagtaaaaaaagaaaaatagagttcattggataaaaggtacttctagagacatagcaaaaaatagaacctcagcagccagggaattctccaacaactgagctttttgaagactcatattatcagtagcagcagcaatgtagaatcttggattaaacctatctttctgtagcactaccaatagattaagcatctcagcagtatgaccacctacagaagataaactataaatttgtggaattctcatgaaatgttttgatatggatggaaaaggaggaaaagtgagtgcaaacctgatcctaaaataataagggtactaacaggttttgaagcccttttgctcaagggcctgctgctacgatataagacataaaggagacgaaccaaaatcaaggagacaacaaaaatggcacttaaaagacagcaattgaaaatatactagagaagct

SEQ ID NO: 4350 - DNA, 902 bp, Glycine max
tcgacctgcagcattttaccctgaggttttgccatatggtgaaactttcttccatgagccagttggtagagcttctgatggtcgccttatcatagatttcattggtatataccttttcaataattctcatcatttttttgctttatttcttattcatttatttgtgaaacacgatcaaatgacatgtttgctttttctatctactttgttttctttttctttaatcatcatgtggtgtctcacaacacaagctaaatcttcttttctttgagttttgttccacaaagattggattccagtttgtgttgttattggagttataagatacatgtggttgaagggagaagagggaagggtgatggaggtcatgagttagaatcttttttattaacaaaaattaacaaattaacaactaatatatattgacagataaaaagaattgtgttgtcattgactaagtgaccaacacaaacatctctacccaaatgaataaagttgggattcaataagaatgagttgtgaaatttttttacacaatatctctgtctaccattatctatttagcagccatagaatcctatgatggtcatacttacaaagtggtacataaaaaatataaagttttcaccaagtgaaaatttaatatgagaagatcataatatatatattaagggatctagttcaattagttgaagtgtatataagtattgtaaatttcctcttatcgtgttcaatttctgcatatcaaaaaatatatcataatatatatagttctattgccaagaaactatcatactagtgatttggtgccatttgtgtttgcagcccagcatctaggtttcccattcttgagtgcatacataaattcaattgggacaagttataggcacggtgcaaacttt

SEQ ID NO: 4351 - DNA, 1009 bp, Glycine max
ttaatgttattcgcttctcttcttccggtaagtccaattcgctgcttctgcttctcctcctaggaaaaggatacgtcaaaatttgattggatcaactagttagtatcttgttaattcgcacggatatactttgattgacacggaaatggaactcgttaatcatttttgctattgttcatgagatttgaattgttttccctcatttgttgtcctgcaatttctgttagtaacaactttttttttttttttttgcaggggaattgctagcctctggtgctgatggtacgatcttcgtgtgttcagcgatgctttcctagagttaatgcaattaggcaatgtttcatctaaatcggttttttttttttcaggaggggacttgataatttggaagctgcattctactgatgctggccagacatggaaggttctcaagatgttacggttaggcctttgctttgatttgtcaatgagcacttagaagcactaaaatttaaaagtaaagcattgtaaaataattataaaaaaaaaaacccagccgtatggcagattttgccatattttagctgattgatatccattcaatttgtcaaattgtacactaaacaagctccacagttttcatagtttattaggaaagggaatgctgaatttgtgcttacctgtttcagtttaactaagtaatgattttgctggatttatttctgcacatatatatgtaaggaaagattgagtattattaaattagaattacaaactatgactacaacccattcataaagaacaacaacaacaacaacaacaaagccttatcccactaggtgaggtcaattcatggatcacacaacactatttggtttgattaaaaaccaaatcttcaggaaccattcatacagagcaatgacataatttttttttaatattcattttaacattcctgttttactgcattgatttccagcttataaaagatatttttatgcattagatctcaccacaaggacattttgga

SEQ ID NO: 4352 - DNA, 1303 bp, Glycine max
ggttctgggcaaggatcggattgtctgccaaaagcaacatatggagaaagctttttcagtttttctcctagccagtgaatatgagtatatgacactgttgatctactagtattcttcttttctttctgtaagttatgatttccaactacagaaacaatacatatacatataccataggagctatacagagtgattcacccacacacaagcactgtaaagagtcaagcagggaagaggagaaagatgcaacctagaaagaaaaggacacagcttaagctcaaattagtctctgctcacattgcatgttctaagcttagaacatacggcgttatacctctccattatagatattagagatatttattacccaaatccagatccctattccctcataatcaaaagtaaagggaactccacttaacctttcctagtcttagattaagcttaaagtatcaattttaacaagaattaactatgcagaaaatattgtcctccaagaatactctaaaactaaatttactaccatgttgttatagatttgataaattttgcagactaaaaccaaatgacaattgataagtcattagtttatactactttggtctttttataggaagggaagtttgtcttgatcccttatatagatccctctcaaattgtctattgtctacaacattattatttttgttttgcttacaaaaatactcttaagtggagatgcatcaattaattaggttaaaagagattaaaataatgaaatctaaatagtttgaaagataattttagaaaaataatactaattattaacaaatttaatattactatctaaatttcttaatttttgtgaagtggttgaaagaaacatgttgattcagactacccaagtctctctcctaatgttaatagcatatatttatgaactaaaaagaaatttaggacttgtaatcatttgtgatttgccaaccccgatgaaataaatgaatgaaactaggacttgtaatcagctcattagataagcatcaaaggatacaagtattcattccaatacttgttgtaaaaacagctacaataaactgtattttaaaggtgattgctctaagtgtttgtgtttacatatttatttgatatatggaagcaactggcgatgggtgcatgtatcttttttttatcccttagacatctttccctacacagacaacaaatctaaatatttagctcatcatccacacacatcaatcatgtttcatcgcatttaatctcttttttttaaaaataaaataaaattgacaccattgtctgcatt

SEQ ID NO: 4353 - DNA, 977 bp, Glycine max
gtactgtcctgggaagaaagcttctggaatatgtgaagatgatgatctatatgatgatttcatcatggatgaagttgatctagaacttgagaactatgaggaactttttgggatggctctcagtcactctgaagagctttttgaaaatggtggaattaatagcttatttgaggcaaaggacatgtctgctagtgctggtgattcccattgtcagggtgctgttgctgctgaggtactcaaattgcacatttctttcttgtgataagattgatttttctattattattattattggagcatcatctgtcatatttcatataactgagccatgtttttggttgttgagatttgcatctatgaattttaatgtgattaaatcttccactttacaatgatcttttagcctgttccctcgtgtcccttgttatctccctgatgatctggtgataatgaatatcttaatttgtatgatagaacgaaacagtttatatatatggcctacatctcaatcccaactggattttcccactacctaaatttcttttaatgctatatctaatactttcctagttgagaaggcccaagctttattatcttaatgatttgaagtggaaggaagacggtgaggtcggcttcatggatcacatgatgtcattcgacccggttagagataaaatcttcagagatattatttatcatgagattcctctttactgtctccaatgtccttcttttttggatagaatatatcagtgtgtttcgattccttaaatctcttctatttatttgaaggcttacttatattttgttctcccacttatgggacatacatttaagtttgagtaatgggatttcttttcttttgtgggatctgagttaaatggttttgcatcatatctaaacttttctttctattttctagggatcgtctgctgggttggtcaatcctatccaaccagcatgcagcaatgcagcat

SEQ ID NO: 4354 - DNA, 1104 bp, Glycine max
ggaataaagttctgatgacaagtactgcttgtaaaatcaacactctgttcatcaatcatatattattaaatcaatgataaataattaaatcagggtaaaagaaggaatttaacgtctacttaatgataacctgaagggcgtgaaggtcggggttgttgggcatgagaatctcgacaacaccgagacacatggcggagccactctcaaagacaggaagtgcgagagatccaggacgtcgtagatggcgcgggtactcgtgacttctgaagaagcggatgttgggagtccactggtcatgaacccaatcctcctgaaactgaaaagctgatgttgtattaagaagcgcggcgtatgggtagttatcctgaggctgagcacgtgcagatctcctccgttcgggtacccatacctgaatcagcaaattggaattcttggcgtattctttcaagtacccgactgcaataactaatctctctttcacagaggaagatggccccggattctcccttggtccaatccaccatctcttccccaccatcaaactaatttccgggtctgataatgattcttcttggaatattatttgcgccgacgtctccatgctagccatcgtgtttggctttgaagaattagcctcccccccacaattcaggtacgatccaacccttgtttccacccagcatccttccacaaacagttcatctatgaaatccgtttctgggccaaaaatttctgagaagctcccatatgcactattctgcaccaacccaccatattccatcttcctctctctctatgtatatatatagctataactaattaattatgtcggactaatttgtttgaaataagagatttcataaagagtgtgtcataaaatgaagtttaatttatttgtgaaatttttacgtacagcacttcgcccagcttgaaatctgttaagaaggtgaaaaaatgaataatcaattgaaagccaaccgcctaattaagctatcatataaaatatatatattcaatcttggtgtgagaaataaacgacacacatacaaggggaacggggatcaagttcaagatcttcacgttactcccgctttaatttgacct

SEQ ID NO: 4355 - DNA, 1139 bp, Glycine max
gtcattgctatcgttcttgcttggagcttctgattgaaaatgggcttcaaaggttccctgccccctcccaaatgttttattgttttttttccttacattttattgttttcatgaatgccatgcttaaaattctgacttactttttttggcatgtatttatgtagcattgctatgggctgtatttatacggaggcaaagaactatccccgagaaccagctgcacatgtagctataagtgagactttatgtttacgtgattttactttttcaatttgtttcttttgatgttgtaacctaatacatgatttattaggcagcctcatgggaagttgagaacataattacctacttttgggtattattattacttgtttattgttgtttcatccatacttaaaataaaaggactgttaggaatcttgtaattatgtaatttatattgtgtgaataggattttttttgtaattagtcatattatgagctgtataagtatgaccattatgcattgtatttatgactctaataagagcatctgctatgtagtcaagacacacggattcattcacatgttctcttgttttactccctctcaacaaggtagtagagtttaacaagaggcaaccctaatttgtgatttctcggtgggtccataatccactagtgcaaaattcttcctgaatctaagcccgcctctggttttcagccatctttccagcaagtattcccaccttttgccatcactgctggccatgtagagctgcacacgctgccatctgctgccaccttttctgcctgctgaatacacctctagactttgtcttactaagatcaattgatccccagcaaacccacctcgattggtggtctcatgcattttcatgtgcatcgccgtctctagttgtagtttctcatgtgccggcacttcttgccgtgtgtggtggcatgtccagctgcccattctcgccgctgaatatagtgactggattctctctccccttccagattctgtcttagaatttggctttgaacttaactcaattccaaaagctagctcatagggtgagggttgtcccccacttatatactctatcttgacacaatctctagctgatgtgggacttggattttttcccaatatt

SEQ ID NO: 4356 - DNA, 1040 bp, Glycine max
atgaggcttgcaaatgtgaaagctggaaggaagggaaaccttaatgttgccacagaggtatatgattggtttaattaatcatttgttccttacacctttgtcaacttttcatttcagtccctatacctaaaaacttattattttcgtccctatacaaggcatctcttttacattttagtccttatgtctctattttgtggtggttttacacggccaaaaaactaacaacacaaactaaaacgtaaaacaaaattgctcatatatggactaaaaagtagcaaaaagttggcataagtataaggaccaaatgatcaattaaacctgtatgattttattttttttttgttatttggtgatgtgggacactatttgtcacattattgtactgaaattcaaaagtacccaatcataaacagatattccaagtggcaccttctcttcacatggttgaggtacggaaggcaaaaggagatacattggagttccataaggtaaccttctgtccccttatttgtttaattgtgttactgcttgccacttcaaaaacaactcttctattgtcaattttaacaataattaaagaagcttattatatcagcagttgggtgggaataagagcataaacttttttcattttgtcaatttcaacttttttttataattaataattataccaataatttgtttctgcctggcttatacttcccatttgtgttggtacactattacaaatttgaataagaaaaaaaaaaaaaacttgaaccaagtttcttatatcctcatcaatcatcatcaagttcttaaattaaacaatgacacatggaattttttttccaatgtttgatagccttcattagaatatgtggctgaattagggaaagtacaacatgccattgtttgacttgagaactttatgacaaagacataagaaactacctaagatttgtcctttgaataactcttctgtgaaaggaatttagatcctcttgttcttgaataattggagagagaatgtaatttaaattgtttgcttccaccct

SEQ ID NO: 4357 - DNA, 1265 bp, Glycine max
catttctattaagttttggaatttctgaaatatgttggtccgtgacaaatctttcttactattttaataactcaatgtagttcgaaagaattcgcttcactacataaagctgagagttgcttgcaattcttgtctccatagctgaaatggaaagaagggttgtaattatcggggcaggaatcagcggccttgttgcctgcaaatacgttatagagtttggatttaatccaattgtctttgaagttgatgatggcgttggaggactatggagacataccatggagtccaccaagctccaaaacaataaacaaatgttccagttcatggattttccatggccgccttctgtgaaagaagataatccaagtcacaagcaagtgctagattatgttaactcctatgctgaacatttttccctcattccttacattagattcaactccaaagtaattgatatagattatgttggtggagagtccagtgaagaaatgaagtcatgggaattgtggggtggtaatggcaggccattctgctccaagggaacttggcatattgctgtgcaacataccaagaatttatccatagaggtattatttatagtttatttactttggtaagctcttagtttataattggaggaagtcttgctttcatttatctattccttgttttgccatcaagcatcttcttgggattcttttattctgtttatcactataacataaagttgtggctaattgtcaccataattatgcatgcataaattttatattgtaccaacagggttcagttgattgagcagtgtgcctaagttgtggagtttgattccttcttaaccaaaaaaaaaatatattgttgaatgacatggaagatgagtatgagtttaaataatgaataaaaaaacagcatgtttattagattcttttgtcatttgcaatggtcgcttttgctatatagtataacataccaaagtgaacatttatatgagcaggtgcatgaggccgagtttgttgttctttgcattgggaaatatagtggttttccgaacattcctgaattcccacccggaaaaggcccagaagttttcaatggcaaggttatgcactccatggactactccaatttggacaatgacactgctgctgaattggtcaaaggaaaaagagtaacaataataggctcactgaaatctggtcttgatctagcagctgaatgtgcaaatgtaaatggtgagaaattttttgttggaaattttctgcacaaaa

SEQ ID NO: 4358 - DNA, 1102 bp, Glycine max
aaaataaatttaataattgttttttggctcgataataaaaatgaaacaattgcactattttcacatattcaacctgcacccctgcttctgtataaacctacgaaaattacaattcaaagccaagattttccacaaagtcatatacacgctaccactaaaataaagtgactgaatattaataatcaagtatgcaaaatcattcacttaccttcaataacacacactacatgttattcatttatgaattatgatcaactatgttttcttttcgtacttctagtgagaggagatatatgatatatggttgaaattcactctcttgtgctctcacatctctcatcaaatacacttcataaatgtgtgtgtattatactactgttgttttgcctttttttaaggggggggggggggaagtttggactaagtggtaaaatggtccccttaccagtcacaaacttctaagaccagcctttcaaagtaattggatgctttaggcgcaggaaaactatttacttactttccatgagctgtttctccagacaacattattccatcagaaccttcacgaactgcaattgctatatctgatacctctgctctggttggagttgggtgaacaatcatgctttctagcatatttgttgccacaataacagcctttcccatgctacgacacaagttgattatctcttcctacaataacagccattccaatgttaagatgagctcaacatgacatccatccagcagcataaatgataccaattgataattatttttactacagattttcagaggtaaagaagtttacctgcaaaagtggaacctcttcaatagggagctcagcgccaagatctcctctggcaaccattgcctaaacaaaaaaggtaaaaatagacaggtcagtatcagcaatcagtacagaaatagtccacaatctctatcattcataaccacaagcaatatacatgcaacactaaagcataaagaaataatgcaaggattagattagcaccccatcagatgcagtgataattgaatgcaaatttggtatagagtctgcactttcaatttttacgatgacatgtatatcagcaccgca

SEQ ID NO: 4359 - DNA, 1159 bp, Glycine max
atatacttcaagtggtttcactttgtgggaagagtcgtcggggaagaggggaaagacaggaaaggagaataatgcgggcgagaaaccctctctaggaggtaaaccataaattttctctttattgtgtacattgcatcagtagtattttgtaaaaattcgccgaaatatttttcaatttataaaaataataaatgaaatttataattttatttatatatattcatataaaaattttgattttttcaaacaaacacttttcatcttaattcaatgaatttcatagatgaatttataacaaatttttgtatgataataatttattgaataaatacttaactaaatatgccttaaatattagagaaaagaggttatgatataaaattattttatatttttatttaattacaaattattatttatgataaatttattaatttttataaaaaaataatcttaaaaattatacaaataataatttgtgattaaacaataatattttataccaatgtatcgccactttgttccaccaatttcctacattgtcatggagttttctgtaacttttgtttatacgtgcatgaatctaaacttaaatcaaaacaaggatcaaacaaccacttttccttccttatttctcaatattgaagtctattggcaatttatatatgcaaatcatctcaattgttgcatagaaatttgatctcttcctaaaaacaagtagatggagaaagtcatctatttacaataggaaattatatctgtataattttaaaaaatatatttaataagaagaaaagaaaaaagatgatacctacaaatatatttgtacaaacatttgtttatataaaattattaatgtgataaaaaataaaaagtaaaaatagaaaatcttgtattacatctataaataaatatatatgtcttgccacaatatatgtgttgattcctttcagatttacacatgtaatagatttagcgtggcagtgcgctggactagttagccaaattctattcattgtttgtcaattgccagtattcagcaataaaaaacagtagaagtaataataatagtaattacaatattaatgttgtcaaatatcaactgcataatgtgtctaacggtaacagcgtttggccgcgcttgatactgtgacagagt

SEQ ID NO: 4360 - DNA, 1176 bp, Glycine max
cttgcactgcctgcagtcatgtcttttaataagtttcaaaatgtcaaaatttgcatttgaaattttttataaataaaagaataaatatttgatattttaaaattttgatacttctcctttttatgataatgaatatgacttctcctttttattttatttggcttttaagataaggaatatttctttaaaaaattactaatttttttggttacaaaaaatttactatgataaaatactttctgaagttttgttaaagtgataaatattttgaaacaaattaaaataattaaaaatgtgggattttttttatttttaatgtttttacaacaagagaaagagatgttttaaacatgtcctaaaatacacagtaaaaaaaaccattttaattgaaggagcggttcagtaagtagataggttagagaattctcttttccaagtattttgtcttttctgctgttacgtctgggtgcaattaattgatgtatgcttgtcttgtaggtgtttctaatttctatatccgcgtaataataaactttctactagtatatatttcgggaaaggaaaaacgtgctgcaataaataagggcaatgcagtctctctatacataatttatcgtagaagttcttatttatctctataaaaaaattgtacaaacaaatacaatttcttaaaatgaatttggaagttatgtcttcgtctttttgttgttctacatagtcacaacatcaatttgtgtgcaccttctaaagggagattacaatattctataaataatagtatttttgttggagaatgtttgttatgtccccagttgttcaaatttgtaaagtaggaacatctctttttgctgaacttatgtcttgattttttttggatttttgtcttttgtggcagtgcttcagctttctttgtgactcagacactacgtgccttggcaagggatggaagaaccgtgatagcctctattcatcagccaagtagtgaagtgtttgagctatttgaccaattatacttgctctctagtggcaaaactgtttattttgggcaagcttccgaggcatatgaggttcaactcatttctcattttttttttctcctttttgcaatgtttcttaaatgtactatgattgtaaagaaatggagtttttttttgtgattgttccaagtgattttgt

SEQ ID NO: 4361 - DNA, 1009 bp, Glycine max
catgcctgcagaggttagacaattctatttatttatttttcagtttgtactttgtattaaaatttatcaagtaagtttaacatttctaatggttttctgttactgtcttccttttaccaggggtcaccacttgtaacttatttcacttcattgatcaggttcttgaaaacttgctgttatttacatgaatggttttatataacataacacttctggggagtggcttggttatgaggtgaaacctgctatgatgttctacaggcacagaatgttgaaaattacattttggtctgaagcttaaaagttgacatggttcttgcaaaaaccaaattgaaaacttagccaatcttatttttgaatttgacctatggaattctgattagattagaatgtcattcatcccattgctgttctctgttccaatgctatgatcttttacaatacttaaagagtgaaattaggaatctgattttcagtttcataacttgctattaattcagcttttcatgtgctctttaaacaaatatcctaaaataagattttgatacgtagtgtgaagaaggaaatgttatgctaggtgatttgaatttcctatccttgggtttacttccatttctaaatgtttttttaaattaggaatataaggaagttaggcatattatttgtctgggatttgtctccggtggaaaattggcaatgcaaatggcaactttagcctatgtagattagaagatgtaataagttttctttggtagctttgagcctgtgctgaccacacttaatgtgtcatttgattgttgtatggtatatttgatagtttttgtgttgtaccagcagcacatgcaattgatgatgactctttttccattgataatgactttgaatttttttttctttgaatcactttaagtgtcagctttccttagtcaatttccctatgctcttcttgaagctagattagttctttcatagggattaagattttgtgaagtaacaactttgtttacat

SEQ ID NO: 4362 - DNA, 1360 bp, Glycine max
tgattcgccagcttgctgcctgcggttgtatacctttccaccatctgataaaattgggataaactcagttcaaagagaggctgaagagataattccgatgaagcaaatgaaaatggactgggttccatacattcccttggagggcaggtattcaactcaatttgtttgttttggtggtttttctttggagtctgtttatgaaacattgcttcttgatcatctctaaacttcttcattatggttttatgtcttcaacagagatagccaagttgatagactgaaatcccaaatatttatcttgagttgtacccaaagaaggtatatccttttattttctcccctttgcaattttgtattctacagtttgtttcagatcttctgaatggattgttcttggagaaatatacatacctttatgttattggttatctagcttaaataatcttttcattgtgcttttggcagtactctggttatttttagtctccatttttcacttttcaaggcaaaatttgtaagctacaagtctatcgttaaattttgtttggtgattgcatcatattcttctcctgcatgtagcaaaaaaaactgtagtttttcaagtagtgtgaagaatattcaactttctgcgtgtttgtctgtttttattctccaattgatgacttgcttaagtatttatccttggcatgttctatttgtgatggtttctaatccaaaatgcagaaatacatgagtaacatcaggagtctttgggccttataaaataaatgagtttgtggatccataaaaaaacttaaaatagatgtttggggaaaactaagtgtttatttttccgtttatttcctatatgcaacttgatgaattgaccttttactgtagtttttttttaccttttactgtagttgttgacattttcatgtaaagctttttactcatgcacaattttacagtttgacccctatgtaccttatttatgaatatgactgactcatctcacctatgttataacctgcggtacaggtctgctttaaaacatctgaagttggatagattaaagaaatatgagtactgcttgccttgtaagtctactggctttagaatattacaattgttctcatacgtgtatatcagttttatctaatacaaggaagaagataacgacattttattaaataaaaaaagtgagaattgtggggacttgtggattctggacaatacaattttttttttatcaattattggtgcttcattttgttcaaggcataatgattcttcatcagttagtgtttattttcctaatatgagagttttttattgactgctattctttctggaggtcgactctagaggcaaccccggg

SEQ ID NO: 4363 - DNA, 1218 bp, Glycine max
ttacacaaataatacaaataaccagcactgcacaagacaaggctagaaatattcctacatgtatattagggcattagaaaaaaaaaaactaataaagttataaaaagacaaaaattaacaatagtgaactgagaaaagaaaaaacgagagaccgtgactttcaatgttttaactaatatttctaacaaaactaataaattaatattttttataaaaaaataccaattacctcctattttatatgtgcttatattaaaaaaagaattttattaataattttgaacaactaaaaatatttttttttatcaaaagataaagcattcgttacattagtaatatataagttaaatataataaaaaataaggtagtaatattaacaaaacctttaaaagggttttattaattatttgtttaaattttttttggggggtgttgtctgagtttcggaaactatgaagtgttcatcatggatgtaaatgtgaagtttgcaaaaccgaaggaggacttattacgtcgtccttgtaggatgtgccccgtttgcaaaaaggtgggggaaatcatgcatgggagagggggtaatagtccatacacggattgaagtgtaaaaggcttggaactcatgggacatgaattatgtcacagggtcaaatttaaagtaggagagaggaaaagaaatgaatgacaattgatggatatatatgatgaccttgtgctttatgcatgcagataaaaaaaattattggaaaagacttaaataatgttagtagtattttttaattaaaattgaaatcttattttgatacttaccttcaattttaattattaaagcaaaatgtaataatacattttaattcgaaaatatctaaatattgtccaaaattttatgtatattgactgaaaatgtggatagattatcggcaatgtcgtcatgatggcggaagtcttgggaaactagagctcatgcacgtctcaaagatccatgaaatggaaatgaaccccatgtatccactgatgatggtataggaaagcaacttagcatatcagatttttttgcagatttatcagatttcacaatgatgaaagttcagagaaaaatggctaaataaaataaaatttaagaaaaaaagtaagaaatcatcacaaattttagaacaatattaattatacttcttttacttttcagtagacaaaaatagatctccatcattttcatagag

SEQ ID NO: 4364 - DNA, 1201 bp, Glycine max
aactaacaaaaataattgcaattactatatgcacactttaaaagctgagttggagaatgagtgccagagaaaaagttatatcattcctaacaggcacacaataaataaatgcccacttaactgtaatcaccagcgagccaaagcaataaatatagaaagcagacaaaattcaacgggaaaaaggggataacgagataaccaacagcataattactgatttaatgagcacgcatctcaatacaaaacgttaaacacatgtccatgatagaccaaacagaagccgcgcaatcaattaaggcaaaaaaatgaaaaaacaaataactaaacaggaaaaccgaaaaatcataacggaaatactctcgagagactaatcaagagataacaattaatgcatgtttgaccgtgattgttttttaagaaagggtctggctaacccgtttaaggaattaaaaggagaaatcttttagtggaaatcatatggagcgcatttaaaaatcacaggagagtgcatttttatgcattccgataaataaaaaaatcattttacttccttaaccagtgttctgtagaaaaatacattaaaagaaacccacattaaagtctatttaaataaacttctaagtaagagagaaaaagaaaataagaaactaaaaatgaagtactccttaatttaaaattctccataaattaaaattaagttatgcagctcaggttttctagaaataaactgagagagcttctatataagttgatttttgacttatcacataagttcaattaacttttaacttttttttcctccttaattttttctgctacaagtgcttactgcaaagatttagtatgtccaaacaagacctaattaatccttagtcagctaacacttcaaagttcaattttccgaagcagtaaaacgatgcaaaagcaactaagtaagagagacgaaccttgagcagagccgtgttgaaaacgacgtcggctttgttctgaagcagcgcgacggaggcgctgatgacgccgtcgagtgatttgagagctgattcgacggaattagagcaggcagcgcaggtcattccggtaacctccacctgaatccgcctcgctccgccgttgatttcgtcgtaggagtccaagagccgcatgtcctccagctcatcggagtcggcggcggcggttctccggtcgccggcgagggaagtca

SEQ ID NO: 4365 - DNA, 1187 bp, Glycine max
ctgacttccctcgccggcgactccgatgagctcgaggacgtgcggctcttggactcctacgacgaaatcgacggcggagcgaggcggattcaggtgtcggtcaccggaatgacctgcgccgcttgctccaattccgtcgaatcagctctcaaatcactcgacggagtcatcagcgcctctgtcgcgttgcttcagaacaaagccgacgtcgttttcaattcggctctgctcaaggttcgtctctctcgtacttattttcttttgcatcgtttactgcttcggaaaattgaacttgcttgaagtgttagctgactaagatttaattaggtcttgtttggatatactaaaatctactgtaattctttgcagtaagcacttgtagtagaaaaaaattaaggagataaaagaagataaagtgaattgaacttatgtgataataagttaaaattaacttatatatagaagctctctcagttaattgctagaaaacctgagctgcataacttgattttaatttatggggaattttaaattaaggagcactgcatttttatcttctttttttctttttctctcgtacttagaaatttatttgaataaactttaatgtgagtttgttttaatgtatttttctacagactacagcacactaattaaggaagtaaaaatgagagttctttttattggaatgcgctccatataatttccaataaaatatttctccttttaattccttaatcatgttagcaagaccctttcttaaaaaatctcaattcattaattgttatctctccgggaaaaagagtctcgagagtattttccgttatgatttttcggttttaccgtttagttattttctttttaaattttttttttgccttaattgattgtatggcttctgtttggtcaaaattgcgtttaacgttttgtattgagatgcgtgctcattaaatcagtaatcatgctgttggttatctcgttatcctctttttcccggtgaattttgtctgctttctatatttattgctttggctcgctggtgttgcagttaagtggacatttatttactgtgtgcctgttaggaatgatataactttttctctggcatacattctccaactcagcttttaaagtgtgcatatagtaattgcaattgtttttgttagttatgactacagagcatgcaa

SEQ ID NO: 4366 - DNA, 1105 bp, Glycine max
tcgacctgcaggaggacaaaaccaagacaaacctgctggaaatattgtggcagaactaataagcccaattgagtccagtgctaaggagccactgtctatacctagtattaatggtcagagttctttaaagcaggaatcctttgtcagagatgagaaatccattgtacccgcagttcatgttcaagctgttgcacctcctgtgtcaaaggaatctgctccaacattatctgctggaaaggaagagcagaaatcaattggatgctctgttaaatcaaaccaggatggtgaacgtgtaaataataatactgttagaaatgagttagcattagataggggaaaggctgttgcaccgcaggctcatgtatccgacacaatgcaaattaagaaacctgcacaaacgagccctgttccccagccaaaggatgtgggatcaaccagaaaataccatggacctctatttgattttcctttctttactaggaaacatgactcctttgggtcatcaatgatgctaaacaacaacaataacttgtcactagcatatgatgtcaaagatcttctttttgaggaaggcatggaagtacttaacaagaaaaggacagaaaatttaaagaagattgaaggtttattggcagtaaacttagagaggaaaagaattaggccagatcttgtgctgaggctccgaattgaagagaaaaagcttcgcctagtagatcttcaggcacgtttaagggatgagattgatcaacagcaacaagagataatggcaatgccagataggccatatcgcaagtttgttaggctgtgtgaacgtcagcgcatggaacttgctagacaagtgcaggcatctcagagagcagtaagggagaagcaactcaaatctatatttcagtggcgtaagaagcttcttgaggctcactgggccattcgtgatgcccgtactgcccgcaacaggggagtcgccaaatatcatgagaagatgttgcgggagttctcaaaacataaagatgatgacagaaacaaaaggctggaagccttaaaaaacaatgatgttgacagatatagggagatgttgctggagcagcagactagcatccctggtgat

SEQ ID NO: 4367 - DNA, 1014 bp, Glycine max
  misc_feature (1007)..(1007): n is a, c, g, or t
ctctagagtcgacctgcagatggtcgtttgtttcggcttgaggtctaggtttgatgatgagtatttgaggaagctcgttatgcagtttgcttctagaagggacatggcaaagcttgctgcttccttacagttcggggacaagatcataggttcgtcttttctttgccaacttacatttctgttaaattctgtgtttattaattttgcaaaaaaaaatatatcaatggacacccagtgcttcgtgacacttggagagagaaatgtagtatcatgtaataggaagagaggtacagtgaaataattgatggagtgtgtggtgtctgaatgttattactctatttctctctttttttactctcaaatagcttctgggtgtcaaaaaatcatttttctactctataatttataggctaaaatgcaaggaaccttcttcaactatagctcatctgttaaaaaataaataaataggaataccctctcttctgtggtgatgaacttcatctcaatttttagggggtgctagatgttattccaacattgtacatttatttttcacttgcactttatcgtactacgagtcagcaacaattgagttctttctgcatttcgctagcaattaagacaatagaaatatggagtaggggaaatgcttttataaatttcaacggcctgaaagtattattgaagctcctccacttgttctttgctttgtctgcttctatgtcatgccactgcctccctgtgcatttgaattcctagaaatcactccccaacctcccagaaacatgtgcataacatcagtagctgactgactgactaacattcatttcttatctatatttacataacacagtgcaggtttggattagcttattttgggaaaatatttgttgctctttgtaaattcctcagtgaacttttgaaaagaaagcaattatttgttcaaaattgagctgaaataaatgtgtcatcagctgtgggatgcacccttctgcaggcatgcaagnctggcgt

SEQ ID NO: 4368 - DNA, 1076 bp, Glycine max
cacaggtacctgccagcattggatcaaagttaacaaaaaactcaagagactcaccttcatcttgtctcttgataaacatattcaattgttaaggttgtatcaatcataattcttgtcttgctaggaattttgatggtataacggataactgagcaaactaccttattgttattcagaacctgaacgtcatataatgggggccaatccttcttctctgccaatatatgagctgcatctttgaatggtttcaatgcatgaatctcatcaaacatccatgggaaaatcatctataaaagcaagtgaacatggtaagaatcttctccagttaatagtaaagaaaagaaaataaacagattagcattcaacttagtggttaattacctacatgggaaatgcaatttcatgcataatgctccatatccaaagggcatgccaattgtaaccaaatcttttcattaaatgagtgcatatattgataaacattatagatgtacaaggtttgaattattcacatcatacatcaatcaagttactgaattctatgactatgtttggataaatttctcaatgataggagaagaaagtaagaaggtaaaatgagttaaacttttcccataagttaaaattaacttatgcataagctaatttatacaaactttctcatttaacttctccaaaagttagattttaacttatgcatgagctaattttaacctataggagaaacttaattcattttaccttcttattttcttttcttttcttataggttcttattgagaagcttatctaaataagacctgtatttggatacaggcagctatatattcttgtattttattttattttaaccaggtatcagtttccccccactaggatatgtggaagaacaaaaaaaagaaacaatactaagcacaacaatgttactctgaatagctttaatgcaatatttatggcgtaatttaagatgttttgtgcaaagtaaagaaaaatgatattctttacaccctacctctcctgtaaaaagtacaggtagtccttctctggcagctctaattgcatcaaactgtctccaa

SEQ ID NO: 4369 - DNA, 1295 bp, Glycine max
ttatccctcctggtatggactttagcaatgttgtgcgtcaagaagatggccctgaaattgatggagagcttgctcagcttactgctagtgtagaaggattttcaccaaaagcaatgccttcaatttggtcagacgtgagtaactgataatccaatctgtctacaaatattactcattgattactgttgccggctttggacttacaattcagtgcaggtaatgcgtttctttagaaatcctcacaagccagtgatcttggccttatcaaggccagatacaaagaagaacttaaccactctgttaaaagcctttggagaaagccgccccttaagagaacttgctaatcttgtaagttgacttaattcagctgtcctctcagtagaaactattgttaagtgcttggagaagactaatgtgttttcaaacagactctcataatgggaaatagggatgacatagatgagatgtcttctgggaatgccagtgtgctcacaacagtgttgaaaatgattgataagtatgacctatatgggcaagtggcataccctaaacatcacaagcaatctgatgttccggagatataccgatatgctgcaaaaacaaaggtataatcaagtttagtagtttactttatatatagaaataatttacattttaacaattatgaacagctaataattttaaattttgtctcagggtgttttcatcaatcctgctttagtggaaccttttggtcttactttaattgaggtaggactcaactaactagctactttggtcataagtttttcttttaatgttacaacttacaatgatcccttttttatctctaaacatgtaaaaactcatgcaggcagcagcacatgggcttccaatggtggcaactaaaaatgggggaccggtggacattcatcgggtaaaatgaatttatattagttacatggtccatcctacatgtttcagtgtgaagaatttttttctcagatagaattggaaaacataaaattcacatttaaatgcaacaaattcttgtcccaaaggttgttgtagactccaaaccttgcgatcactgaccaatgtctccttttgatatgttaggccctgaacaatggtttgcttgtggaccctcatgatcagaaagcaattactgatgcattgatcaagttgctgtcagaaaaaaacctgtggcatgattgcaggaaaaatggttggaagaacatacaccttttctcgtggcccgagcactgccgaacttatttgactagggtggctgcctgcaggcatgcaagctgcgc

SEQ ID NO: 4370 - DNA, 1070 bp, Glycine max
atttctgtcattaaaataggggttgacacatactgtaattcataaaggtgggtcgtgggagggtggtctgctaatgattattctattgtagtattgagctcatattatctgtgatttataccaaggggtgggaataaaggtgactggtaaatgatatgttgtgaaagtttttaggattcatgtggaggcttatttcagaataatggtggagagtgacatgctgtttataatttcagggaaaattgggaatcaagctaataatgtttgaataattttgactgtcaaaacgaagataaacttattagttgaaggctacagaaggggaatagaattttcactaaaccacaaaaaaaaaaaattgaaatatggatctcctggtttttgattttttttttcttgacatccatttgtttattaattcaattgattgttcatataaacttggatttttttctcttcaacttacatcgaaaggatttctctctctgcttctgaagtttgcaccaaaagaaaaaaacacaacattaaggatcttcaatattatgcattgccatttctggatgccacccatagatatagactatgtttttgtttagactgatgagtaggtttgatataggattacagttaattggacataattctgaagataagaatttaggaagggaaagtgttatttaaagtgttaagataccagtatataatttggccaacttctgttttgatgcactttgtgttactattggaagcattattatttatttgatacctctccctcctggttcaatgttgatagtgaagcattttacttacagtatttcccccatatgttatatctataatattcaatttattgaataaacaatgttaagaagatagaaaatgaatgatcagtagactaatctgtttgtgatgtgctgcaatttacctgattacaatatgttcttgtctggaagtatttgctggttttcttattgagttggacttactcaaagacaattttctattgtattcctgtaaatacttttaaaacagttttggttcatgaatatttaatacttagtatgccc

SEQ ID NO: 4371 - DNA, 863 bp, Glycine max
aaattatcctatattttttttcctcaccttcttgacttccacgtgataatttcaagttttaactagaggaaaatgtccaaattggtccccccctcccaaacaatagggtaggggatgttttagtccttttgggttaacttttttaaggaccaattgggtcattgattattttgtcaaggactaaattagtacatgattaacttcttttgggactgtccatatgcttacaatggagagaaaatgaccggagaactaatatgttgtgtcccacgtttgtaatcttgaaggactacatgattattattattattattattattattatttttcctctctagggactaaattgtctactgtaatttttttcaaggctcaattaggacctttaaccattatttgtgtctttaatgtttttgcacacttttacataagatcattttttcgttttttgtttttgggttaacaagaagccgagctacgtccaaatctctgtagagtcatattcccatctgactggtttggaggatcaagtgaagacatatgaagaaaaagttcagacactggaggaagagatcaaggaattaaatgaaaaactgtcagcagctaattcagagataaataccaaggaaagcttggtaaaacagcatgctaaagtagcagaagaggctgtttcaggtatactgctttaatggttcctatttctatacattcaaacctcaaagtcttccttaatttgaagtgttttttattgttcttggaattaaaattccacaggctgggaaaaggctgaagcagaagctttggcattgaagaacatctggaaacgtcactcttgcaaaactactggtgaagaccaggcgtca

SEQ ID NO: 4372 - DNA, 769 bp, Glycine max
ctccaccaccaccaccaccacgcctcagagcttcttctaaggctccgaagtcaccgccagagattgtaaatagggaatccatttcatcaaccagagctaagtcagtgcctccagacttgaagaacgtttcaagggccaaaaggggtgttgtggtgaacaagcctaagttgaatgaagaggctaaggttgttgttgttgctaggccacggcggagggttggggattttgatctgcaaaagaatgaagacgatgatcctgatgggaagaagaagaaggagttgcaggagaagctagaggtgagtgagaatttgatcaagagtttgcaatctgaggtgcttgcattgagggaggaattggatagagttaagagcttgaatgtggagcttgagtctcggaacacaaagctcactcagaatcttgctgctgctgaagctaagatatcaactgttgacattggcaacaatggaaaggtgagaattttaatgtgtctgtcatgttttgcctcagataacatgaaatgtgtttgaactttgaatgcccttaaaaatttccaattacgtcttgttttcttattctgtttataattccaagtgtggttaattcatttattagagacatcaatcactttttgattggatttcccttgttaactacttagtcttagcttatacagtggtacaaaaatgagatcaaatatctgttttatgcataaaaaatttatttgtcaccaactgtgcttggaaatgaatctgattatttttttttcttt

SEQ ID NO: 4373 - DNA, 983 bp, Glycine max
ttgcatgcctgtcagtaaagtttagagaatgcttgtgaagtcattatgaaagaatatgtacagcacttttgtagttttcaaaaattaaaaacgaataaagtttttataattaagaaccaatactaaaagattttcacatttttacttttagagacaaaagtatataattaaagtaagaatcattaatacactctgcactatttgtaataactcaaacaagacatgtcttatgctagtcttcaaaaccagggagggagggccaaaagggctgcgaaggagaaaattaatttgtctgcctaagtacaaacgtgggcagatgcatggaactgaaaccattactaattgattgtatcattgtactaatgcctacccacatcttgtcatgaattaattaattgctcgtcaaaaatggaaaccaaagattaagactcaaattatagctataccaaccatggcagttagggtacttgcagttgtcattattacagatagcgccacatctccactagcaaaacaaaagggtcattagatcacctggtcatcaatatgatcaaacaaagtaaagcattaattaattggaattatatataactgagaatataccgtgaaagatatgttataatgttactagttgtgcctgcaaccaaacaaagatcgaccattttgaatatgatggatagaattataagaaaactaagaaccacaaaattaaatttcatacctcctggactgcacccaattaatattaaacctgctgcaaaatgtggtgcaagatttaagagtgtgcttatgagaaattcagagtggcatcacctgaaatttgtcagcaatttacacaaccacattgttgtctttctctgggtttacaacatgcacataaacttcttggcccagataccacgagttgaggttctctggacgaaggttccaaataccggcattgtcaagagataccaaaatggttgtccaagcaccaggaaaga

SEQ ID NO: 4374 - DNA, 955 bp, Glycine max
ggacagttcacaaaggtcaaattggtcacatctatactaacaaagataacaaggtacataatttatataaaaaaaaaaaaatcattaaaattccttatcagttcattatcccgttacacatcctcttatcttactctattattacttctattatttacaaatttattacttctgagcactgattaaactatggttaagcactgattaaactatggttattaaagacgcgcaataggtcaccatagcaatggccctacatttaactcggtatattaattatgccatacttgcatgtgctctgtccatactaaatatcaaagaattagaggaagacaccgcagaatgatattgcaaatttcatcaaagcttgacatgaaatgactataattctagtgttttgtttatacatatatttgcactaaaaagccacattattcttggtcccatatactagaaacttcactatagtcccaaacaaacaaaagtttaaggggatctgctatgttggttgaaagttgtaaagatggagcaaagataaaactcaaaaaaaccattcaatttaaagccatttgcacaagatattgtgctttaagagccacaaaacaggattaaaacaatcatagatgtcagaactttaaaaataaaacaccaaccttcatacgctgctgatcttgtgcagcttgttttgctcgtgctctaatttcttctggatcaattttagactggggacggaccacaaaatccaaaggtgttgcttccggccttgatgcatgctgcctagaagaggactgtccagacctaggcctgcaccagtgaaaaaaatttgacatacaaaatattttagtgattactcgacccacagtgctccacaacaagttcataaattccattcaggccttactgtgaaagttccaaatcaagatcactgtccctagattccattcctgcaggtcga

SEQ ID NO: 4375 - DNA, 1130 bp, Glycine max
tttgcgccagcttgcatgtcctgcgttccacaaccgctcctgctcctccattttgcttctggaagatgccacgcttgctgagacgaaactaattcagacctcacatcattgagaagcttcttcaccctcctgaaatcctccaaggtctcactactctcctcagcatgcctcgcagcatcctcacccagcctcttcagctcctcctgcgccaacatccagtccattgcctgcttctccaaattcgcctcagccaccctcagcttctccctctcaacctccctctgaaccaacaaaacctcaatctcctcctctttctcttgaaccaccctctttagctcctcaagctcagcctcctgcttcttcataacctcattcgcttcatccagaatcctccccttctctctaagctcagaatcaaaatccgcagcctcgcgactcctctcctccaattcaaccctgattttctccacttccccttccttcaaccccagcgcatacttcaccgcatcgatctcactatcgcgacccctaaccctaagcttcagctcctcaatctcccccgcctgagaaaccaatttaaccattgtctccttcatctcctcctcaagcttctcatacctaatcctagcagcctcaatttcactctcttgccgctccagctcctccttcgtgagcttcaacttactattctccaacaacaccgtcctctccgcctccatcaagtgatcctccttcatcttcagcgccgccagcgccgcctcgagatccgattcaagaatccgaagatccggttcatctccggttatccggttctccgtgaacagtctctcaaacaaaaccctagcagactccgccgctccgtaatcgtcgttcacgcttgcgctaggccggttgtcgttcaacaccgacctaacactgttccgtaaacgacgacatcttcttccgccgttcgacgagaaacctattcggctactgctatggtgcctcctattgaacctaacagagcaaaacaactacacaaacacaacaaaaccgttccacgtcacattcaaatcggatacccgaaacacacaaactcgtttcgaaaatcataattaattaatcgaatcttagtaattgtagatattaat

SEQ ID NO: 4376 - DNA, 1174 bp, Glycine max
agcagctctggtagtaggaactcttccagacaccccaggcaaaggtgtctctctgtcacattaattactatcagtcaagactgggagtggagggggaagtggtggaaagtatgacttagaaatttgttttaaaagtttgccaggttcaataggactcgtatacagtgctttgttgcgatgctttaaaaacaagttccctgcaacaagtagaacatcaatcaagtcaacaatgagggcattatagattccttattcatataaaaagttactagttctttcccagacttcttttttattagggcacataataaataagtcaaagaaaagtagtaagacctaaaaaatattgtcaagtgacatggatacggagatataaaattaatataatattaaaaaaggtgaaggaaaaagaaaagaaaaaaaaactcctcattatcatttctaacaaaaattaacaattaaactaatatttattgattaaaaaaaatggcatcaatatttcaacattaatagcgtaatctaataaccaaaaccatgttggcaataatcatgacttaatgaagaatgtagattacaaaaaaaattgtattacatccatttaaaattattaattagtttgcacgcactttgcattaatcacggtgctgctactagcctactttatagtataaagaatgagtatgatcactgatgagttctcatcattatcatgtaaaacaaagggtcgtttgaattgaaaaaaatattgtctgtttttatttcttatttacaaatccttaaaaataagaaataaagtaaaccaatccttaaaaataagaaataaaataaatgtaaggtgacaattttgtaattatttatgaaaatagaaaataaaaatacaaaatattttcttaaatcaaacagactttgagctttcaagttctaccaacataaagaatggactaacatgtatagaaggttcaacttctgtatctatcagctgtcttagggaagtcagtaataatgccattaaccttgactccaatgacaaatgaatttatctcaatggatggatctaagtacgtagtagtcccatgcttgagatacaaattcattgctgaaagtttctacataaactgggagcttaattaaatgattttagccttgccagagtgtttgtagagctaactagaaa

SEQ ID NO: 4377 - DNA, 1264 bp, Glycine max
aaaacaagtgatatcatcatttcccatccattgatgttgagactgtaaatagtaaaatttcaccattagcagtgcaagagaaaaaaaaaaaactcctatttacatcaaactaatacaaccaataacataacacatttaaattttagtgaaaaatgttctagtgcagaaggattaccatatggatagagcatcaatttcaacctccgcgtttttcatgttacccgtcaaaagaaccaatattgtgttgtaccagagctcaagactgtaaaatataaaacagcttcaagttagaaagacatgtaacaatttttgttcacgataaataacatagtaacaatctagattctctaagaaaaaagtgtttcattgaaatctttttctcacacccttttacactctcagtgaataaggtcacatcaaagggaaaggagaaaagttaaagagaataagtaatgtcttttgaataatgaggcataatttgctagtaaaaatgatttatgataaaacatcaagattgacactcaaaatggaaatggattctatgctatcaggcattcacacaaaagtaaattgaaaccatttgatgaagatcgaattgttcaaattttggatgtgtattttaacttttaagtcagacttgcgagataaaatatgagtcatctgatgttgacccaatgttaattccccgactgaagggaatccgggtctacttttttttatttttattgtttaagtcaaaacatgaattattattattaataggaagaatccgggtctactcaagaccaacaatcatagaatttgcaaagaactgagcctacttgagaagaaaactcaccataacatggcaccagctgaaagggacatcttgacaacaggccagaggtctttgaatgccaaaaatgtgaaacctttccatgtatcagagcaccaaccacatgtgacaaatatgagttgaccaatattaggaatccagtatgccaagcctgctgaaatcatagcaccaggaatcccaaacttgaacttcattgtcaaaagccaggagagaaacacgtgaatgactatcgaaaaagccgccaagaacgcaatgatgatgttcttgctttgagattgcaggaacgtctggcaagtgaacgagacaatgaaagcaaacatgacagggattgaccaaagagcaatgtttcctgccacttgtgctatgctctcatcttggcccaagagcaacaaaatggggcttgtgaagatgaacacaggaagaagacag

SEQ ID NO: 4378 - DNA, 1026 bp, Glycine max
gctatggatctattctactacactaccatgttttttttttttgtgaaaagaactacacaaccatgtgagttatagtattcacgaggattgtagtttaatagcaccgcaattaattaactactcatttgattttaaaatttggaaagaattgagaatttctgtgttttaatttattttgaaaggaaaaagaacgcaattaaacgaaccttctaaatcccttcttattacatgattaacttctagtttccctatcccgatcccttgagtgataaacccttgtttctactttctagtcgtcatgaatcctgtggtaaaccaaaaatagcaataagttcaagaaatctccaaagatacatacaactcgattatccaattacggtttagattaattatccatttcctaactaggttgattaaaaaaacattaagcacatattcaacagcttaattaatataaaaagattcagaaaaggggataaaaaaatttaagaaaaggaaaaaaaaaatgtacatgagaacaggcaattggtggtgtttgtttaatttttttaatctatggtggataaattacgatgttaaattgatacaacacacaccatcacaatagctacttattcctttattattattattattattattattattatttgattagccttgttgctagaggactttacatatgccttaattattgtctccgtgctaattcgtctaatatgaaaagtttaccattggaattaggataagcataaaattctttttcataagcagtattgaacaaattagatattgacccaatcgtcacgcaggttaaaaaatatttgttataattttaaaaaaaatagaattaaataaataagatatttatatattttttgatttaaaagtaaagtagaaaatgggtaatcaaaatgaacaacatttgattgctctagatctatgtattttaacaaaaacaaatgacttgcataccccaacactggaatgcttgatatgaaaaatttccagtggcacctaacagtt

SEQ ID NO: 4379 - DNA, 959 bp, Glycine max
aacttttctcttattttttaatttttaaataggttaacgtatataggtgtggatttggatgaaagtggtgtgtgactgaaaaagtggggaaccccgtgactggacctgtccacagtgcagttcttctgtgatcttgtgagaggtaatagaagttactggtgcctggttatgttatgttgtgcatagtccttttgtttttatgcacgtgagttaggatcaacctcacgtggcccccatcccccttccatctgtaaccccattcacgaaattgactgctcatcactttttcaccatacattttccatcttatatacaaggttaaaatattaaatatagtattttctaacgaaactgaatggatttgcatttattttttttaatggtgtatctctaagtgcataccatttaactttcatttaatttgataataactatatatacttaatttgctaatgcatgctcactaacttgtttgcgaactgtgcagtatgcattttaagaattagtaaatttagtactcttaattaaatcttaataaaccatcacggccattgggaatcagactttgaggtgttttataagatcttgtccctttctatatttaacggcaaagtaagtattgccatgtgtccgaatttgagtgttacatttctactttgtaagaattgattaatttagtatatatactcccaaccaaagattatatatatatatatatatatatatatatatatatatgtccgaaaagagaaagaagaaagataaagatgtatggatatcgtaattccaagctgtcccattgtatctttgcatcacagtgtaaatgctcgccatgattgtcggagggctaaagaatcgtttcattaataaattgatattcgtttgtttaattaaaagtgatacaaataattataaaactcgattaagaaaacaaaagtacaaaagaaggtaggggcgaa

SEQ ID NO: 4380 - DNA, 1303 bp, Glycine max
tgcttatcgccaagcttgcatgcctgcagaagcatttctattttctagtataatgtgagtactgataaagtcagtattagttgtattcatgttttgccatgtagacctttcaagtatcatgaccgagttgaaggctgaaagcagacagtttctaaattatcaaaatgcttatgtgtccaaaattatatttaaagtccaaagatatatttagacacataaaccaaccatgcattatgtcactacattagtgtaaggtatacttattttgctctggacaattttagccaggcaaggcataaggcccacaaaaattaatatttgacaattaaacttgtgatttttcagggatgtcattagtccatcatgtaatatctaacattttatgctttaggtctagcaagatgtgtgccgaaaacatctattaccatcccactaaagcttgtgataaggagacttttccttccttgtttgtccattaaggaggaagcaatacaagttcctgcaacaaaataaaacttcaatcagaaaaaatatcttgtttgtggaacatatacaataaccttcttttactgaatgcacaataaacatttttaagaataaaaaatactaaccaaaaacatttgatgcgccaaccaaggcacttgctgcaacatcagaagcaattccagcactacggaacacagaagttgaataatacactacagcatttattccagccaactgctggaacaagaaaagtgctgccccaacactgacaactgaaacaaggcatattttaaggaagtgctatatactatttcatataagaattcatttaatcaactatatagtaaactaaaaaaaagttgtcagtgaaattaaaacatgaacaatgataagattattggtaaataataaatcttcatacaaatatatcaggtatagaaaagggcctaaatgaaatcaaacatctaatggaagtctcattggttatcaaacctgatctatgcattgggtttaggttgaaccgggagaactgattttcacgaaacatcattcaagatataattatcaaaatattatgaattttacgtcgaacctccttacataaacacccttaaagaaagggaatttttatgaaaaagcctccaaagatgcaggttagcattatcagcgaaaattatttttgtccatggtgttaccaaacctagaattagctttaactgaaatttaggatacctttccaatatcgactactaaacagatcaagccaccctgcttcaggttctgatgaaccttgacttgctgttgttaagtcattcat

SEQ ID NO: 4381 - DNA, 1172 bp, Glycine max
aagtctatgcaggtcacatggaaggagtgtccgcaataggggaggatacgcagcatatcctcaccttggtattctgagaggcagactgtgcatctgcaaatacaatgaaattgaatgttcaaaagcaggaaaataactatctgaatgggagctgtcatcaatgatcatgtgagaaaactgcaatacctaaagcactcccctcaattaagttactgacaagtgacaacataaaccacattcataaaaacttcagattttgtatcctttataagaattacgggaaaccaatgggcccaaccacttcccaagcagtattcaaatttccaacaagaagaacaaggtttaacatgacctattatatcatcattagtttagaagccacaagccagaacaaaaaaaaaaaacatttatgacatgaataaattgcactgacctcccacaaggtttgcctacatataactacctctttgtcataatgtctggaaggttgtaatgaagggggtatgtgtaaaatattaaaggatcctcaatggagaatatgatagatcatgttaaaatatgtgtctatctctctcctaacaaatattagatagttcccacatattttgcctaccaagaaagagatagacacaaaacttggccatgtcattaaaaaaattagatatgagaggatccattcccatggcatacacatatacagcaaaagaaatccactctaagataagcttcttttgcaagaaatcaacaaaacaaatgatgatagcacaacccaatcaagacactagacaagagttagtcctaactcctaagccaatggaacatgtcatcataacactttctcaagcgagatacacacattttcaaattaaagaacatgggatcaaatgcgccatccgaagccacaaaacaaatggccataacctccctataagatgcacaaccttctttagtttaaatgtctttcaatatttggggttgacaccttcattacagtgaagttcttcttaactcaacaagagaattaggcataaactacgtctacattatattattttgcctccaaaagagtattaaacagtaattaacgtcatagacaggttggataaaaaaaaaaaaatcagaaacagagatgtgaacatactgagaattttctgctgcaggcagtgcaagct

SEQ ID NO: 4382 - DNA, 1176 bp, Glycine max
aacaacagtcttccttagtgataccaaattctttgtatattcttccagctggagcactagctccaaaacgatcaatgcctattgcttttccctttgctccaacaattttctcccacccaaatgttgatcctgcctcaatgctaactctggctgaaacagcagcagggaaaacactctccttgtaggcttctgattgctcatcaaaaagttcccaagaaacaagggaaacaactctaacagccttcccttccttccttaggtcatcagcagctttggcagcgatttccaattccgaaccagttccgatcaaaatgacatcaggcttgttgccagtggagttgtccgaaatggtgtaaccacccttttcaactccttcaatggaagttccgggaagctggggcagtttttgcctggatagggcaagaatggagggtctcttcctgttgagcacggccactttgtatgctccggctgtttcgttaccgtcggcaggacgaagcatcaaaatgtttggcattgcccggaagcttgctaggtgctcaataggctggtgggttggcccatcttctccaagtcctattgaatcatgggtcatgacataaataaccccagcctcagacagcgcagaaagccttatggcacctctcatgtagtcagtgaatacaaagaaggttgcacaatatggaatcagtccagggctgtgaagagcaatgccgttgcagatagctcccattccgtgttctctaacaccgaatctaacattacgctctgctggagtatccttttggaagtccccgaacattttgagcaaggtcatgttggaagaagcaagatctgcactgccaccaagcagaccgggaagaacctttgcaagggcattaaggtttgtttgagacaggtttctggtggcatccgctgggctctctggagtgtatgtctgaaatcaaattggaagccaggttttaatatttggaataactttttgaagccccatactaccaaatcaaactgaaatcatgatcaactttggatagtatgtaatccaaaccttgaaaagttacaaacatgtaagaaaaacctgtgagtttagaatttactcaccggaagtgctttctcccaaccagcagggaattcaccattgataatagatttcaattctgcaggtcgactctagag

SEQ ID NO: 4383 - DNA, 989 bp, Glycine max
atcgccagcttgcatgcctgcagcattgatgcacactgaaggcaagaccaaatccttttgtttgtttgaagttttctatttaagcctgttgaacttaaccccaccctttttgatctaattgaggcggaggcaggaccgaggattgagtcccttgcctgcaaaactcctgtcctattgttgctgtgcctatgataggattatggatccaaattgggcccaataaggctttaatggatctgggagcatatgctcttatgtattctgtcttccttttcttatttttgtataatcttcctttttgttagataggagttgaatcctatcaattggtgcgttcattgagagaagtttaggggagattttggtgtatgcaaatgaacatgttttccctgtgactttttgggttcaattgaatccaaaatcctatcagcttatgcctgtttataggcctaaggctggatccacatgccgtcataaaagttttaagattgtaaagtcacatccatgaagtccatgaggtagagcataaaaccatcacaaacaggaatgaagcaatgagctaagatttatctgcttgtatagaaatatttgagtggacctactctaatataaacattttatattttcctgtgtgctatgccaggtgttttgtttgaaggacgtgggcaaaatgaagaagctctttgtgctactattaatgctatactactcgaaccaaactatgttccatgcaagatcttgatgggtgctttgtttcaaaaattgggtacaaagcatttggctattgcaagaagcttactgtctgatgcactccgaatagaacccacaaaccgcaaggcttggtataacttgggattgcttcacaaacatgagggccgaataagtgatgctgccgactgcttccaagcagcttccatgctcgaagaatctgatcccatcgaaagttttagctctttacctgacaggattcaattcctaaacagttaact

SEQ ID NO: 4384 - DNA, 1288 bp, Glycine max
cgccagcttgcatgcctgcagtttgtccttcagttgacaaatccttatagacaatgtcaatatatttagcctaaagattcatgaaatgagaataaaaatcaaaagttgagagactatcctgttgaaaatgacaatttcatgttcaagctggaacctgcgagtattgttgttttggttataaattttcttcagatagtctcacatctttgctgccgtggtgaaaggtctaagattgaggacgatattaggctcaacagagcctatgatccaagtcatgtcctgtgcatctttgacctcccatttggcgtgtgcctctttgtgcatagttttgtcaggagcagaatcaattccatcaacatgatccccaagctccttgcctttgacaaagatctggaattggattgcccaggtggagtagttctttccattaagacgaacaaagaggacatcatatttttcagtagacatgatgctgagaaaaaatcacaggaggagaaaaaacaagaaattggagaaatcaagaacagaaccaagatcaatgtgaacagtactgcacgcgaacaatactttgacgtgaacagtatcgcgacgtgaacaataccgcgcaagagactaggactgggaactcggaaactaagagcacagcgaaaaaaaaaactaggttgggatcaaaacctagattgataccatgttaaactcctagaaaatgagatgaaaactgtgcttctcctctggagaattctcatttaaataatatgatacaatttgatttctagccttgaagtttgctaaagaaactattaaaggtaacttacagttgggctaactaattaaggatataattacatagtacgactatacaatcatgcaagatatgctggtttaaagggccaacaagtctgcacaaataatgtcaaataatctgcctatgaattctattgacagtttggttccctaatacaaaactgttcagcatgagttaatgcaccaaaactctgactgtataggttacatagatcatcccagcatgtaagtctagtttcccctaattacaaaaaaccttctctgatattgcttgaccaaaagtgaaggtgtgtcaaatcctttttcaagattcttcagccaagtccagcagaaaaatatagcgtcctccagcagcttgttggcgttgaagctgtcgtttgaaaagaccatctgtttctatgattccatacacaccatgttagggacacctaccaagtgagccatctctgtgatttgacaccaagagaggtactgtagagtgagt

SEQ ID NO: 4385 - DNA, 1148 bp, Glycine max
tgcctgcagctgaaaaaaaagtgagctgcatcctcctccttgttcctgtagaatgggcatagcaggtcattgatctgtacatgtctccttcgcaggtttaatttcgtgggcaatcggtctctaattaacctccatgcaaaaaaaagatgatttggttgggatctttaattttcatagttcgtcaaaaactccatccaagttctcatccgttgattcccccatcagcatattatatgtggtttgtgttgagtattggccatttggatcagctttccatacccagttatctcctctatgtggctggattacagtccgtgctatgtcccccaagaagccgtcagccatgtcgacttcattatcaaataagggtctcctccatatgaaattccattcccagcctgcatctgtgtgactgcctagctgctgaatgagctgcttttgctggcaggaaatgcgatacaacctaggatattttatcattaatgatacatcatcaccagtccagcattcctcccagaatctgaccttatcttcacatcctaccctccaagctatcttgttactagtaacagaacttattatttataaattaaaaaatgtttgttgaccaatgattatactcatagtattcttacggctgtcttcatataataattgctttgtgtctgaaaggtgaacaattaattttgcttataagttcaagtctgaaagaatgaaaatgaaatttgaatgtcaaatataactatctggctctataaggcttatttatatctttcatttattttttatattatagcaattatcttctaatcgtattatagttataattccattcttgagattgcttgtagactttggtaaaaccttagattgttttttattagccagatggcatgttatcataaatgacttaattctcaaatagctttttgcttcaaattgattcatttaaaatttcgtagttatattagggatgtctgtatccattttttcacttgtatttctgttctgcttttttacacgttacaggttgaaaagcataagattttacaagttggtaatgacaaagctggggccttcacaaatggagggcatgaagttattgagactggaactaacaacatcccattagccaataccagtcatgc

SEQ ID NO: 4386 - DNA, 1160 bp, Glycine max
aggcaccaaaccaagggatttaaaatttattaaattataaacatgaaatgattaaataaagagttgaattcccataattttatacgttttattaaatttcactcagcaaaaaatgtattaaaaaatatattattcccatttgtctgtctttatttatgtcatctattttaatttttctgatgtatttaactggggccaaactgaaacatgttgatcatgcaaaggcctactcaccatttcacatgtacgtgtcatcacccagcaaccccatttttctacataacacacactccctctctaacactcacactccaataacaaatatttcactagctactactcttcttagtttctctgttgtatcatttttattgctatatcctaatcaaacttcactctcaaaatgagtgatcccacactagcacaacagcatctagtcaaagtccacacaacaacacacgaaacagttgttaccacacacaatcataaccaaacaccctcaataaatgtgtgttactgaattatttaattatttgtacacctaactatgattaatatttaattcttcaaaactttgtttatgcatgataaccgtgattaatttttatttttttcccctatgattgagaacaggcctcaggtgaaaagaagaagattgtgggggtgttctacaaagggaatgaatatgctaaattgaatccaaattttgttggatgtgttgaaggtgcattgggaatacgtgagtggctggaatcacagggtcatcagtacattgtcactgatgacaaagaaggacctgattctggttagtacttagtatcttgccaacttaattcaagtttgagtaaactattattttgatgatttgatctataaaagtgtacaacattgtgaaattagtctctaacattgtcacattagtctctgaaattaagataatttcatatgacaaatgacatgttattaactctttttcgtactgtaaattgaaaaatgtggctacgtgttatatgaaaattggttgggacctggtctcggatcatgtaataatttctatcaaacaaggtatcagagtaatcaacactataatatcatggaatgcaaatgtgtttgtcccttcaagattttaattgcttgaactcaatggaatttgatgttct

SEQ ID NO: 4387 - DNA, 1325 bp, Glycine max
  misc_feature (1302)..(1302): n is a, c, g, or t
agcttcgatgctctgcagcagaacatcaaattctcttaagttcaggcaattaaaatcttgaagggacaaacatatttactttccatgatattatggtgttgattactctgataccttgtttgagagaaattattacatggtccaagaccaggtttcaaccaattttcacataacatgtaaccacatttttcaatttacggtatgaaaaagagttaataagatgtcaaacgaaattttcctattccacgtaacacataaccacatttttcaatttactgtacgagaaagagtcaatgacatgtaaaatgaagttttcctattccacataacacgtaaccacatttttcaatttgcggtacgaaaaagagttaataacatgtcaaatgaaattttcctagtttcaagaacttgttgcattgtacacttttggagaccaaaataatagtttactcaaacttgaattaagtaagcaatatactaaccagaatctggtccttctttgtcatcagtgacaatgtactgatgaccctgtgattccagccactcacgtatacccaatgctccttcaacacaccccacgaaattggggttcaatttagcatactcattccctttgtagaacacccccacaattttcttcttttcacctgaggcctattctcaatcatagggaaagaaataaaaattagtcacggtcatgcataaacaaagttgaagaattaaatattaatcatggtcaggtgtacaaataattaaatattcagtaacacacatttattgagggtctatggttatggttgtgtgtggtaacaacggttacgagtgttgtgtggacttcgactaggtgtggttgtgctagtgtgggatcactcattttgagggtggagtttaattaggatatagcaataaaaatggctcgtcacagaatctaaggcgagcaacaagtgaaggatttgctattggagtgtgagtgttagagagggagtgtgtgttatatagaaaagtgaggttgctgagtgatgacacgtacatgtgaaatggtgagtaggcctttgcatgatcaacatgtttcagtttggcgtcagttaaatacatcagaacaactatcatagctggcatagataaagccagactaatgagaataatatattttttaatacattttttctgagtgaaatttaataaaacgtatcaaattatcagaattcaactctttatttaagaaggttcctgtcttataatttacatcaattattcaatacccttggtttgcgtgcctgcaggggtcgactctagaggggnataccccgggggtaccgagggct

SEQ ID NO: 4388 - DNA, 1106 bp, Glycine max
cgccagcttgcatgcctgcaggatgttctattcaagtcattcttttagatcttcacatgcctgatttagatggctttgaggttgccacgaggattcggaagtttagaagtggtaatcaacctatgattgttgccttgactgcaagtgcagaagaagatttgtgggaaagatgcatgcaagttggtattaatggagttatccgcaagccagttttgttgcatggaattgctagtgaactcagaagaatcctcatgcagggaaataatgtcctttgagaatggaatggagggtgcaagttgtaacacttaagcatctcaagtatttaagttattattttaagtcacattcttggtagaattagaacacagcactctttggctcccacttgctagcaatttttagcttagagatgttattatacaaacgattttcataaggaagaaaaagatggtatacagattagttccttttcagtagtgtcttgacggtgttattgccatgtatgtagcttcaaaatctaatacatgcgtcttcccacatatatccatacaataagaagaatgaaaaaataaattatctaagaagatataactctagggtgtttttggcttcatttttttttggagattatctttgtttttttaatttcttctacgagagccttggaaaaaacaaagtctttcaataagttaaaccaagtacgtattctgtattcatttattttttttatagataagttgtatatttgtttgttctcaattattcagttttttatttggagttttctaggaaataaatagactttcaaatgatctattatggtttgggagtcactattgtatgcttaagatttctcgaaacgtggattacaaagatgtgtaatactattaaataacaacaataaatgtcttacagtaggatcataaaaatgatataaatatcataaggttgtcctgtcaacttttggcacgcatcgagagagacagcctttaataactaacagacttggataaattagctgagagattatcgaaatcaataagctaaaaatggttataggaaaataaaaaaagaaaacgtaagaattttggaggggttataatatt

SEQ ID NO: 4389 - DNA, 1230 bp, Glycine max
attctgcatgtatctgatctggaaataagagagaccaagatgatgggctcatctccagtaattattgtaatggtatgtaaattattagttccagaagttcattgctaatttagaaaatttattcttatgcggtagaaatgaaaacttacatgaatgattttgttaaatgaattttcacagtttcaaactcagcaaatctattgtgtacgtgataggaatggggcaattacagaaggaggcaaggtaaatgctgcgtttttaatggtttatattttttaattgctacaatgtgaaaatgtcatatcagaaaaaatttcatgtagtttttaacgtcctatttgagagagcgggtgcctctttatagtgttaactttctaattccattagtttgcaaattttgccttcctttcccctcaataatctcaatgtaatttgtgcccattcgtttccatgttgagctgttgatgttctgtcaccagctcatgcatctcctatctattagaaattatggaaggcatggatcaagtaaagatgaatggtgtatgtatttttatttttcacatttaaataaatatatagttatatactatggaaatgttagaactcacagtcacagtggtatgaaaagcagaaattcaatataacagtgttatttaatatgaaagatagcagaaagctagtacaggaatttagaatgacaacctgagtgtgtgactccttttccagagaaatattttcctaaacaaccaccattcccccctactccttttttctctctcctcacctccttacatactccaccccctaacagaatttgttagaatctcctatgccactttatgtaactaactcgcactccctaatcctattttctttctcctagaataaactttccatataatgggcctatgtgactcctcaccaatatgaatatcagtatgaatattagtattattcactggtgtcctatcattactcccccctgaagaaacagccttgtcctcaaggctaagtgcttgaaattgacttttcagcaatgcctcatcttcccaggtagtatcctcagctgctccgccattccatttaaccagccactatttgactggctgctctccttcaaatatctctcttgaagccaacaactcctcaggttcttcattttcctccaactccatcttcaacccttcaggtaaagatgcctctgcaggcatgcaagcttggcgtagatgt

SEQ ID NO: 4390 - DNA, 978 bp, Glycine max
ttgcatgcttttagtagatgaattacacataagtaaaacaagtaaaatttatacaagtgaccaggtataaaatgatggccacttgcaagttagatatgcatatacataaagtaaaagtaaactgtttccagtaaaaacttgtgctcaaaagaaccaacagtggttcactaaaatcttattagtccagcatagggcataaagatgtgtattaaaccatcacaatatgcacaacattcgccgagaggtttcagatattttgataagctaattagatgataataataataatcagatgacactgctcttctgcaatgaaagacttcatctgaggaatgtgagttcttgatattttaaataataggagcatataggatatagcataggcagagacacgcaaacggctacagttgttgatcaatcagattactggatgtggttctttaccttctatccccaggaatgaatcattatagccttattataggtatctctcccaatctgacatatatctcctttcctagggatataaacagcaaatcaaaacctttaacaaaaggaaagtattcacttacaatgatagcaccaacagggtccatccaatcatcaacataatttgccaaaagtgcagcaataaggccaatgatattagtgatcacatcaaaaaagtgatcctgggcataggctttaattatctcattggtaaaagaacgacagtaaatcatcagcaggaatttcaccaaagtcactgaaagcataatgcccacaacccagcgctcttgttccttggtcaagttgaatgcattttcctggaaatgtcattacgagacacattagaaatacctagaaaaaaaagagatcctaaatgcaactaaatgaaaatttaatgttttagcagtttgggtgtcagatttgcctaaaaaaatagagcaagaatcaacttacagaagatattaatgtgcgggtagactccaagattat

SEQ ID NO: 4391 - DNA, 1102 bp, Glycine max
tcgacctgcagatttgaggagatgccaacaaataattttgttgagagcaggtaataattgtttggacaaaacttagatcaagttccttgtatctttgtcatcaagttctccgtattcacatgtggatgttcttcccaataatctttgtgttgcaaaattttaaataaatatccatgtatcatcttttaattgaagttgatggcaatgatgtaaggaacttgatcttatttttgccttgtgagtttccatatcaatggcttcctagtgtctctgattgagatttagataggttctgttgtgttgctgtcctctcaaagatgttaaatgacatgtggaatatttttttcaagaaacatacttggaatgtataaataacaataaacttaataatttatagaataataatagttgaaagaagactgccaatgataattttctctgcatctcccttttcaactaaacaaaagctctggtcttcactgatgctttcaagcaagcaggtgaaacaaaatgttttaatttgtgtaggtgggtgactttggatattgtagcccttaagatttaaatccagaaaccaaagttttcccctttcaaaaaagagagaaaaatatagctttgattgtttcatcgggcctttgaatgatattgaagtaactaatggaactgttttcttgttatgatagagaaatcctcttggaaagtttctttctgtagtggcttcagacgttgaaaagaaactgttctaaattctgaacaatgcattacaacatcacaaatgaagtgacatttaaaaaatatatattttccagatctcaaatcatattattagtctgcatgatcccttgattcttgcttatatgtcctatttactatttaggtgatattgaatccaacaggttatatgtctgctctcgccttaaatttacatctgaatgttttaattggcagcttctggaactttgatgccttgttccagccccaacaacacccagcccgtgattcacatgatacattctttttggaaagttagtaaaaccttaattgttttcatcgtgctaattttgtattctgtttctattctgagaacatgtgacacatatat

SEQ ID NO: 4392 - DNA, 1212 bp, Glycine max
agctgctgttcttggatttgctgggcttgcagctttttttcactataatgatgagagaagagcggttcccaaaggtatttgcaatctgctattctcaattgatctgctttgaagagtttggagttcaattatttggttataaaacaagtgtttgtttttatctgtacccttcttgaattgttatgccctttcttcatgagcaaggttagatgttattattcttttcttatatttagaagtggcgatgtttggttaaaggatgaatacatcataagacagtatgtgatttaatatgtagagttttttccaattagtttgttgctaggcatgtttgcttgagtccagtttacaccaaaagggaattcttacaggtttctgattgatagtgtcaaatatggtgatgataaaggaggtcagagggtttaagtatatcagtgatctggcgtactggttatgaagtttcagtggtgtagttcaaaggtctaagcatatgttagaattaattttggaaagacggcctgatggttttggctttatagcactctgttaaatccattgatgcaatttatgaacatgcaagcattttgcagatgggaaactttccatggtcagtttttacatgtcatacacagagtaacatcagagtgtctaagaatgacgagctatgcaccttttgcttagttatttacttatatcattgagttttttattgcggcattgtgccaactctacccaagtcacttttagtgccatttaatgattacgcatgtgaatgtgtatatgtatttggggagagtctttggttaattgacagacaaacacatttgactagatgctcggttcctcttagtgtaatccaacttggtttctttctgttgatgaagattctaatttatgtctcaataataaaatgtttctatttgttcttcatatgtatcagtgagctacatatgctttgatgagaatatatgctaaattatcaagaacaaatcattacagcagaatgtagggtggatatattaagctgttacatttttgcaacaagattattccaatacataaaggaagtggtcatgacataataatttgctacttagttcttactgaagatccattttttgttgccttaaaactgtatctcttctttgcaagggtctctgttttacaaagtaggcaattgtgccgtaaaactgttctctcaggcatgatttg

SEQ ID NO: 4393 - DNA, 1256 bp, Glycine max
tcaaaaaaagtatttatcatgtgggagagaagaagccccacggtgggtagtattgccccagttgctgctgctgctacagtccccaagagtaacactgggatttcaggcttgttaagataagtaacgcagagaagtgagacttcttgaggtttatgtgatgctactgaaggaagaatttcaggccctccttctgatgtttcaaagagatctggtgaggtaggcatggcatttgatatttcgaacgagtgttggcagccgtttcttcttccagatgatccccgacttaaagattcagggaaagaaagccgttggctcaattgtcgttcagaatctacaaagttttctggccagcctgactcatttccaacatgctgttctgattcccttttaatttcttgcaatctaatgagctggctaaaagctgcatcaggatctttagtgagctcagcatgtgtgcctaatcaattgagagaaataagaatgcagcaatgtacatgtcaaggaaaaatgaatatgtgtgtttgaggagagaatgacatgaaagcagattgttatactgagattcatttttcgtggcaacacagtacgtataactttttctattactgttccttgatgaataactgcaatgacatcagcattccttattgtgcttaggcagtgggctacaatgacagttgttcggtttatcataattctgtctagtatctcttgcaccactctctctgattctgcatcaagagcacttgtagcttcgtcaaggagcagaattcttggatccttcagaattgctcttgctatagatattctttgtttttgacctccagagagctgaattccatgctcgccaaccatcgtgtcaagtccctaaactcacaattttacaaaactaatgacataaaaaggtctcttactgaatacacacacatagacacagaaaattccaaaatatgaaagatgaattgcgagctcacatggggaaatttatctatgaacttagcagcattagcgagttcagctgccgctctgatttcttcatctgttgccccatctttaccataggcaatattctctttaatgctgcaagcaaagagaactggttcctggctgacaagtcctattttctgtctgatccatttcagttgaaattctctgagattgataccgtcaatgagaacttcaccagcttgtggatcataaaatctctcaattaaactaataactgttatttcccacttccactttgccctaccaaa

SEQ ID NO: 4394 - DNA, 1215 bp, Glycine max
tttattatcctctatgtgcgtaaattgaaagttctgataaagatgttttcttgtaccgttcgttagtgtttttgtctacattttcaaaccaaccttggtggagaattttcccaggtgctttcgtttcaccaagagttgatgcaaccaacatgacttttttttttaattaattctattttggagataaattctttcttttggtaatgactttagtgaaaaaaaaaatcaaatgaagaaaagggaaatcccgtaagttgttacttggcagattggttctgcgctatacagtgttcttgagtatcagaaaatgtttgatagacaccgaatatgatattcaacatggcaacatctagagagtaaaatataggtatgatagagtttataatgtgatagaaaaagtaggataaagaaaaatgaaaagtattggtgtgatatttaaaataaagagtgatttgtatatcattattcattagaaacagtgacttcatgtactgcaagatctctgacataaatgtcttcccccttgtactgttaattcaatcttatttccagataacaataataaaaggaccctattcaaggtacatggaagcttggatcggtttatttcataacagagaacatattataggagtatactaactagtacatttgcgaatgaattctcaagtttctggtgtataatttttaagggacaattttgtgattgggggacaacgaaaggcaacaagaacctgatgtgcatagcatatgtcaagcaaagtggtaatatgtaatttgcaacaatcgggctgaaaccagccaaggtcattaatacatgaaaatcaatgctcaaatcaatattagtttacatagaacctgtgcactgttacagaaaaaccacccaccccaattgtttattgtccaaaaatataaaatatatgggacacacatgtttgataaggccaaaatcgaatgatgattgtttcctagggataaaaaaaaagaacaaaccatcctttcgtatgactatatacagtttactgttataactatctcaatggcttcctatgcaacatagattggcaaaatgctttgatatctcagttaatcacaatggatgcttccctctgagctaacttgagaagagtgctccttgagtttgacatcttgaagctcagtttagaaaagagtatacaagttcaattgtctctcattcacaacatgacttcaaag

SEQ ID NO: 4395 - DNA, 134 bp, Glycine max
aaaacaatttccaacattgaaaaactgtaattgcatgaacaaactcagtggaatgaacatacagcacaaacgttataaaacataaccttgcatcgcaatccaacaaatgcctcgggatcagcattatcaaaact

SEQ ID NO: 4396 - DNA, 1000 bp, Glycine max
atatttggctccggagtactttatgcatggagttgtggatgagaaaactgatgtatttgcctatggagttttgcttttggagctcataactggtcgacgcgctgttgattcggatagtagacaaagtcttgtcatctgggtaagtcttcataaccccctaaatgtaatggagtgtattagactaataggcttcattaagagcgcatatcagtgagtcctcaattgaacacatgaggacttggtaatcaagaattcaatatgtttatataatggcttgcaaaattcttatgtatacaaattagaaatcatttactgttatcaggccaagccactactggatacaaacaatgtaaaggatttagcagaccccagattaggagaggaatatgaccctattgaaatgaagcgtgccatggtgacagcttccaggtgtgtccaccatgtatcctccaagcggccatacatgaatcaggttagaaaatgagcatatggtctttttcagcttaagtttgattcaccacattgttgtaccattttccatggtaggaagctaacttgtatctttgttaactacaggttgtgcagctactaaagggtgaagagacaattatggaaccaaagaaaactttagttgcacaaaagtctctcatgttagaggcatgtgacctagaagaagattatacttgctcaagttacttgaaggacctcaatcgccacaggcaactaatcatggagtaaactaaactaattataaatcattagtgggatttcttgttttctcctatgtatatttgttgaaagaatggagtgatatttagtagcagtgcgtgtggccaaatccaaagacactagccaagttggcttgttattcagctttgaaatttagggagcgttactcaagaagcaaaatcatagtttttggctttttggattaacgcttgatgcagcagagtttgtgtaatgtaatgtagaaatgatgcagcagagtttgtgtaacttt

SEQ ID NO: 4397 - DNA, 1130 bp, Glycine max
agatcggtaagctgagtttcgatcttgttgaggaaggtggtggcttcgtcaaaaggccgcgtcagatcagatttgtatttcaccagcatgtcacagtaggtttcctgaaacatcatacaaaacaaaaatcacacacaaactcaaagtaaaataaataaatcattgagtaaagtctcgcattataacttggcttgggttaatgtgtgtgtatgaatgtgaaaatatgtaataatatataaaacgtgcgtgcgtgtgcaggtatgagagagaagaaggagaaagggaaggaagagggaggggaccatgaactcgtcgagttcgggatcggcttcaacgcacgtggaaacaacaacgtctctcttgcaaacgtcgttttctcgtcggatttcctctaacaaacacgcgatttctggaggcgctcccacctgtgtaaccatatttgttaaaaacagttatgaacaattgcatcctagtaaaataaaaataataattgttgttaaacagaacaaagagatatataaggaatgaataatttaatttaatttcattaccttctggcaatcgatgtaggcttggagaaggcgagggtagtgagggtgagaggcgattttggctttgatgagagaggaggcgtcgttttggcgctgaatttccggtgcgatggtggcgccagggtagggttcggtttcgttgccggcggtgacggcggagagaagctcgtcggatccgaacatcggaatccgggcggcggaggacattaggaagctgtggtactccgccgggaatatgttctccggcgtcatcagcgccccgtccgagtactccgtcgtggacgacacgccgtacatttcgtcttccataacgctgcgtcgtcgtttagcttcttcgccttctgtgcgtcgtcgcgtctttgtagtgtggctgaggcggtgttctagaagaaaaaattgcaaagcgaacaacaacgacaactacaacacatcatgatattatactagttttttattttatttattttacgattatgattaacgctaactagctttttattattcgaagctgcgaagacacgaaaatgattttgacaaaaaaaaaaaaaaaaagtggaatcgccacacttacgttcacta

SEQ ID NO: 4398 - DNA, 996 bp, Glycine max
attgaaattactgtttctcccatttgaattggattctccctggccactactgtcagctaaattagtcacagccctatgtgatcttgatcttctatatacagctttatacattttatctctgtgtgaatgtggttctggcaaatcctgtgaagtactattttgtctaatttgaggatctacttcttgagatccattctctccatgattagacgctactctagtgttgttgctgtcatccacaaccacattgttcaaatttttattatcattagtgctacatgcactattctttagcactgaagattttgtttcaagcttggatggactttcaggatcccttgaaccccttttagaccttaattttgttgaaacacaagcaaaaccaatatttggttcaggtagttggtcaacctcactatagccaatggaagcagttacaatatcctgaggaatcacataagcagaaattagtgattcatttttgtccctgcaattgctggaagctgtgatctctcctccatcttcagtaagattaaaaggctgtgaggtagtaccagcacaattttcattaatctctgtcaaactatctaccttatagtcatccttttggatttctaactcgggggttaactcaggggttagtgcactaaagttcttgtcctctttctcgtgcccactgatagcattttcttttttaccattaatctctgtcaaactatctaccctatagtcatccttatggatttctaactcaggggttaactcgggggttagtgcactaaagttcttgtcctctttctcatgcccactgctaacattttctttttcatcgagatgattaggacattttccagagtagggatctgtgtctgatggcatagcttctcccactctcaaaggtttagatgaacgagccctaaccattccccatctaattttccccagcaagtctacatggtctgtcacctggcctagttttgcttgatctgttttttc

SEQ ID NO: 4399 - DNA, 1115 bp, Glycine max
tctagagtcgacctgcagatcattataaggttacttgattatttaaagcttttacttcacctctgtttgtttaatgtagaatctttctttttctaacctatggtttaattctgactgtagaattctgggtttgagtttgaaagtaatgagacttattttaaagctgccttgaagtttctacatggagcatcacttctagaaagttctcacagtgagagtagcaagcatggagagacaagtcaaatgcaaatatatgctactactgctaaactttttgagtaaggaaaatttggaagatatgtgtaaatttgttacttttatgatctctgatttataatgttttcagtcaaagtacattttgagttaaaaaaaaggtttgggaatgttcagtaaattggaaatttcaaactttcttttggagactacaaatatgtatggtagcaactaaatataataaagggaataattaaactctttctactaaggttttttttttaaaaataaataaaacttctccttggccttaatttttgtaatggatatctctcctcttcctttggagtgttcccactttttttggggggtgattgtgctttgaggttaatggggattaagaggacaataggagccatgaattatagtgctgccataactcaatgctgctttaaactgtgagtctttgtctgtttttggaattacttaacccaacttgtttgcttctctgtaacctaagcacaagtttggatctggtgggatcttgtatgtcaattttgtgatacaaagtccaaaaactatcttcaatagttcaattacactccttcaaccattatattcaattaaaacccgtcaactttgtcatcagtgctttcctacttcctagcataattaactttctgtgtttcactgctgctttgtgctgttaaaaacatacttttcatatgttaaaattctttttataaaatagtgccatcatattaccctagaattttgatggactgtgtttttcttgatctatttgctttagcttccctttaatcataaacttccataaaatgtattccagatcctgcgcccataaatatgaaaaatgccaagaaaggctgcaggcaatgcaa

SEQ ID NO: 4400 - DNA, 1002 bp, Glycine max
acacacactatgccttgcctcactatgattcatcagaatgggattggctgaggggtgctttggcaactatggacagagattatgggattctgaacaaggtgtttcaccacataactgatactcatgtggctcaccatcttttctctacaatgccacattaccatgcaacggaggcaaccaatgcaatgaagccaatattgggtgagtactaccgatttgatgacacaccattttacaaggcactgtggagagaagcaagagagtgcctctatgtggagccagatgaaggaacatccgagaagggcgtgtattggtacaggaacaagtattgatgaaccaagcaatgggccatagtgggagttatggaagttttgtcacttatcacttaattagtagaatgttataaataagtggatttgccgcgtaatgacttgtgtgcattgtgaaacagcttgtagcgatccatggctataatgtaaaaatatgtggaaagtgttctgcttataactttcttccttaaatgcacactccatagaacaatattattggtactaattttaatctgaattgaggatggtaactggtaggtgaggccaactttaaccctactactgtcgttttacaaggttattaaaatcgatttgatcttattaaatttgaaatagtcgccatttaaaaataaaaaaaaatatagaagacaattaaattggattggtttttagattcaaatttaaaaattaatctaaactaaactaaaattttataataacatgtcttataatgtattaagtttttattattgttattgagtttggaagcatataataaggaacataagttaatatttatgatccaataagatcgacttagtattagaatatttagatgagttgtattagatattcaaacttcattcttatcatagagagacaaaagttaatattgattgtggagcaaaaaatgttattgggagcatatgcaaagataagatggataaaatat

SEQ ID NO: 4401 - DNA, 1307 bp, Glycine max
agcttgcatgcctgcagtatttagtgttttattgtttacaattgtttaaactttagggtttagacaagggaaaggaagaagagaaaaggctagcaatgtattttgagtttgatagtaagatgttacttaagatacaatagcgtaatgctacctatttatattattagtattaattaggccaagcagtagcacttctagtacaagccccaatcacactactactaagcaatagctaatgatatattctctaacacctctccagcctttgcttattacgcgtagcaaaccataaatagaaacatagaacattgcaaacttttatttaagaccaattaaactgatctcaataacagaatttggaaactagtacttaactgatgtagctcaggaattcgtgagcagctatctccagtgtaggatcaggtgggtatggagggaattgttgattgtatttctgaatacccagtatagacttgcgcaatgctatttatacatcctcctagatctaagtatccaactattctataaggcactacaactatcaactaactaccaaaaatgggaaagttacaggaattctacaaaaaaaatgcacaaggatgattgctcttgaatttgggctaagcctatctctagctcatgagggattcacaagcctttataagttctattttttccatgtctataatcaatgtgggatctcaacaactattatatcaactctttgtatctaaaccttggctacatccttggaaaatatctcctttcttctccttgacacatgcaccaagcaaaggagtttatagagtttgttagaacatatgaaaacatcttatcatattttagaatatcctaggttattcttgttagatttcagcttaaaaccaattgacatgaagtgaagttatccaatagatatataagctgcaccatgagaattgaggtaggtgatgtgggacttccaaacatttctctatgattggttaatttccgtattttctcatcattgcttaggattgtttactatattttcttattctctaactcattaggattatgataagtataattttttggccactgctccactgccaagcctcctcatgagttttattttaatccgtacagagattatctctgtcctaaaaaccacaaaacacgtgacatgactgtcccttaacaccaccacaccaatacaatcatacaaatgaaaattcataccttttccttactgaaattgtcacatgacagttattaaaactgtagttattattataactaaatcctaatctggtggttataaaact

SEQ ID NO: 4402 - DNA, 1022 bp, Glycine max
acagaagtcaaacaaataaaataaagctatctatgctattttatagtaaaataaaggtttaattgcaaaaaaagttcccttatttttctcattttactaaatctgtctccctattttttaattcactatcggagtcctcctattttttcaaaaatcactatttgagtcctcatagaaaaaattgaacgttgaccattaacatattttacacatctcacgttctcgttgctcaatttgggttcgtgttgctgattttgggaattatggatttttgataatgtgaaggttagggattttaagtggataaagtttacgttttgtggttgggataattgtttttgagataattattagttacctaattactaatgaggataaattgaaaataacgtaaataataaatcactttagttaccaataatgatattttctaaacacataaatacctcttaaacgatcaactatatgcgaacatgtgatagtcaacattcaatttttcctctaggacttagatcgtgaattttgaaaaatatggggattccgatagtgaattaaaaaatagggggaccgatttagtgaaatggaaacaataggaggacactttttacaattaagcctaaaataaattatgaatttggaaagctaacatcatgagaagtcagaaaaccaagggagccaaggttaaatgacacaatagggggaacagcatctctgaatagatttgacgcatgcagtataacgccatctccacccaagcatgccacaaaatcgactttctcatgtagatcactgaatcaaagacacttgatatgtttaacaaacattgaacgaaagcaagacatttttaggagcagaaaaaactgctctgaagctattcatataaatttacaaactccagtacctggtatcttgactatagaaggtctgaacaaatccaaagcctggaattctagcaaatatgtcatgcacatcaggttccacaagaacattcattttctcttggtgataaagaaaagaagcaa

SEQ ID NO: 4403 - DNA, 1242 bp, Glycine max
atgtgaagcgcttcagccgctataaaaatcccgatgctgttagacaagttcgagagtatcctcctaaactaaattgaataacccgtttgtcatttctctttgtccatacatttacttttggttaaataatgttgaattttgatgtaaatgtcctgttcttatagaaaattttacctaagtttctttcatactgttattgactttttattgtctaatttaattttgtattttccttcaattcacgtatattgtgtctcatttggttctgatgagaaaaattggtctatgttaattcctcttttcctggaaggaaatgctaagaaaccttattttattgccatacttcagaattgtgcgatcttaactgacatacagaattctcgccagatatgaattggctgagtttgaggtaatacacctatttccttcatgaaatgagttaaggaagcaagtgttcacattttattttgaaaaaaagtttagagttgtcagttcacacattacaatatatgattctttgtttaaatgaatctgttgcagttgtgtgtccttggcaacctttgcccagaaactgtggaggaagctattgctatggttccatctatcaaggtaaaaataatttgcttctctctatttttgtattaggtaagtttggtttttttgggaataatttccattctctctttgatgtttgttaaaatgaactaggaaggaaatagaggatttaataaaagcaataatgacaagtttttataactttttgctcttctaataacagttaaaattcaattttgacatgcaccagaaagtttataaagtaatttagtttacaaaacaccccgaagtggaggactcacaaaaagtaaatgctgataatttgaaggattttgttatgttaactagagatctcttacttgcatctctccttaaaatcatcccagtaacagttcccttcatttatccccctccccccaatgcatgaaacttcggtagcatagttctcgttatctactgtaccctcacgagcttatgtttgccacactgaacatgtttgccatgtgttggttatggtctacgcatgaggtttttttgcgtttgctggtgaggcaaccagttacttggaatattcatgctctattgggttctgtgaagctgctaagcaagttatattttgcatgatatatttgaataataaaggtaacagccatcaaatcttttacgttaattaatgcatcattttct

SEQ ID NO: 4404 - DNA, 1011 bp, Glycine max
tttagtctgttggggttgtttctttgctttctctgactcctttccacttgagtcttctagctttgcagtgccacacgttttagaatctgaaaaagtattgttatcctcgtgtggtagcttgagagcttcttctgattttgttggtttgttcatattactttcacctttcttcaatttttgtttcacataaggaggtggaacaaggttgtaggaaaatggcctcttaatttctgtttcatcctctgatacgcttcctaatgaacttgaacaagccttattatggccgtccagcgatgaattgtcatcttcagtgctgcttcgtggcgacctccaataggcatcactggtatccttctttccttcaaatagggagacatcattgttcttgtgatcctcatgatcatttagtagatcaggtttagccttctccttcaacaagaaggatgcttggaataagtaatcacttttgtgaacatagctgtaaaagctgaggtaagccaaaagcattcttaaacttgatagtgccaaggttcagttgttgaatataatgtatagctgaataagtgtatatatcaattcacttctaattatccaattcagattcatatttttgctgaaacatatgcttgattatttagataataaaaaataaagaaaaaactaatcatcaattataagtaaaacttactaaatgtaactgaggcggtgagtgaagtctctgctccaaagccttgctattccattctatagagaactcttgcgctacatcatgcaacagctggatcttcatctctttcgaaggaggatactgcctcaacttttcaacaaactgcaattattcaagtaagtggtagaaagtggaaacaaagttgtcatcatgaaaacaatttacaggctataagagtggtcccatccattacctctttacttatgtaaagttcaagagaattcccaaatttcccggtgaacaagcttctgagttcgcgtagttccggcagatcagaaaatctt

SEQ ID NO: 4405 - DNA, 1041 bp, Glycine max
aagagataagctggtctttatattttgtttgataacgtatgtcaatttgtttagacacgtatataacctgatggcttcaattttacatttccttttctaaattggtgaattggatatatagtaagcatttattcaaacttatagtattaatgcaagatagaaaaacaatcgtaacgttaagcaacggtctaagttttgacgaacgaactgaactgaaagagaacccttcatttctaagacgctcccgcccccgtagatcttagtggacataatcggggccaaggtagaatgaccaaacgctccttactctggcaccatagcaagacaaacccaaaaggttcaaccaagaaggaggtggtgatgtaatgaaaaattaaagaatgacgtgttggtggcaccattcaattcaatcaaccccttacttgaaaatccacacccttttctctctttcaccccaaccctatccatccatcattattatcttcatcaaccacttcaattcccgttaaattaatagtagctctagacaggcctcagttcatgtctaaaacgtcatcaacaaattaaagactcagcttaattaaccatgaaatgctatactatactactactactgtactacagtattatgctgctattactaagcaaataaataagaagtaaaacataaatctttgtaatttattttatttttatactaacgaaatacgacttactagtattaatagtacataaaaataaaaattattaacaaattgcagatgaatctacattggcacaagaaattcagagagaaaacataataatactggtacttcagttcacgtgtgcagggcagattgggaaattcacgtgcacttgtacagttctacctccctctcatttccctcagaatctctagatctgcaaatatgcgccgttattcctaccattttccttcatttttttttcttttcttacatttactatcaaagcaacaacaatagaaaagatgagaaagcaagtgcacagagaatcgaggaggccgtggagggcggagga

SEQ ID NO: 4406 - DNA, 1286 bp, Glycine max
aaaacaaggataacaacaagaacatccatcattggaaaaatttgcatgttttgtaacattcttcaagaaatcataaactatagttctttcaaagaaaaatttctcttcacatctttcacttctctttcgtcccttctcatttctcctttcctcctcaataaggtgtatataccccagagagggataaaatagtctatttttcaaatgacaaaagaggcatatgcatagagagtgagggacaaaccattccatacttcccaatctctttgatcatcccgataaactggtgtggcagaccatgcaaagaaaccaccaggtctaagaatcctaaacactcttgtcataaagataatacaaatagaactagtaagtcaattatagaaaaaggttgtcctgatatggacataagtctgaacacaactcagaagaatggaactcaagaagcaccatctgcatcccaatgcaccctgcatcttgcacaatggatcaaatcaaatccgttgtcagcaaatgtcaacttttgggttccaatgacagaaagagttgcaggaattcctcgttccaaagcaaattgtatctgagcttcgtgctcatcctttggtgcaaatgacatagcaataacatttttgtccagaagatagccgccaaagctagcaacttcacaaccaacatcaagaacaaccctgatattctgtccccattggattgttggtagtgtctggcataaaacataagtcattcagaaaactacaagacataggaaacattcaaaaactacatccaaatctagttatctcagcagaacatgtgtaagatactaattaagtcattttctacaccttttcctcgtaaggccaattctaggcctagaattttatcccttgttaacaaaacatcaatctgtaggaaaagcgggatacatttgtttatttagtagttacctagattcaaatatcttagttcttagactaaaaccattatagtaagagttttcctctctgttggaaatatggcagaaaagaaatgaaacagagaagaagaggaagcaatgcaggttggaatatttttagggagaaatatggaatctgataatttattgatcaacaacgtttagattttataatagttgaaagttcaatactgactaacaaataagagataaagatatcagtaactaaatgacttgctcctgaattaaaggtgtcactaaatgactgatgcgcacatatttaacaaactgaaacagtcaaagaaaaagtcaccgcaggcaggcaagctggcgaatc

SEQ ID NO: 4407 - DNA, 1273 bp, Glycine max
agtttcttaaaatagacacataaatggcaaagccaaattagaagaaacccaaacaacttatatcatatatggaaggaaattcagacgatcttttattttcctgaagacgtattcaactctgcatcatgatggtgattgccatctgcccatctcagtattcttcattaaagacaatatatgctagccagaaagcacagatgcagtagtcatctttaattgctgaaatcatgcataaaaagcaatgctttcaatttttgaaaataaaaattaaaaaatatttttaacttactaaactaatctgaacagcatccccggagtaaaacgtaaagcttaatggattataaggtgatggtgaactactgaactttaatgtaaactcaagctaatcacagtatcatttgttacctgttgactggtgtatatggtaacatgtattaactagttttttgaggataagccaatagatgaattgaaatgctttgagttatgtgaatccatgcatgcataaaaccctattgcattaatttggaaagatagtaaatgaatctgatttgttaaaacaatttaagtatgaacattatgataaaacatttaaggataaacgatgcacaattatagaatgctgataacacatgtaataattacaagctgataaaaaaattaaatagttacaagaaggttagaaattaagtatgttcttgaagagtagatggaaaccatgcttattacctcaactgaatcactaacaaatcagttattttttaaggtaaataatttattattaccttgtgaatttgttaacagatcagtaagtttcttttttttaaaaggatgtaaaattaataatgtatagaagtttaagtttaaattaatttttgccttaaatatgtttttaattctctaaatttaaaggttcttttttagtttttaaaattcacaaaatattccttttagtctttctgtgtgagtcaaacttggaataatagatttatattttgtgataatcttttatcatcaattttttttaatatataattttttttattttatattagttgctgaatttagtgatcaaacttcaaatgctaaaaatagtgaccgataatttggtggcagacacaaaacctaaatagccaccgaattaattttctaaaattgccactgaattagccttccaaaattgccactggattagcaacgctaattatatttttaacttagcgacagacgataaaaatagtgactgggggattcactgccagattgaatattt

SEQ ID NO: 4408 - DNA, 1013 bp, Glycine max
ttcgccagcttgccatgcctgcagatgacttcaatttctgatgagttttttttattaatgtaattaataatacaggctcctctatataatgtcaaggacatcaagatcacaaaaaggggaactccctttccacttaattttcttcccgaggtattccgcatttcaacctgatttggagttcaattatttacttcaaaatttatttgtttacaaatataaggtggcatgctacacacttcttgcaccattaatcacaatgtaaaagcgctcaaaaacaaagctatagccatgtaaaatcagttttttacgatgcttaaatttgagatttagcagcatctatcctttagaggacatgtccaataaaccgaactaattaattgtaccttctattaattattgctttaagactgcatctctcaacccatgttgcaggtaagctacgtgccaatctcagtcatgattactaccttcaaaaaggagaatgtaaagagacctttggagggatttggagttcttgttccttctaaagagcaaaaaaatggtttaaaaacccttggtaatgtttccatatgccaatggctcaatatctaaaatgggttaaacgattttctgatgtaactgctgaaatatcttgctcaacaggtacacttttttcctctatgatgttcccagatcgtgcacctagtgatttatatctctataccaccttcattggcggaactcaaaacagggaacttgctcaagcttcaacgtacttttactgtagttctaattatatattttgcagaaccagaaccaaatgagaacatgttgacacactaatatcttttttcatttctattcaactaaaatttatttataattcctactcaataaattatatataatctcctgctgactcgtctttttctttggaataatgatatactgtcaaaaaccatatataatctcctgctgacacatctttttcttttcttttctttatatcattttccttattagtttctttgttt

SEQ ID NO: 4409 - DNA, 1019 bp, Glycine max
agcttgcatgcctgcaggagagcttaaaatcagtgttaaaacgatctgaggatatgtatgtattggatcatcaaggtgtatgttcttttcagagcagatcagatctacctggatgttctatttatcagatcagaacagatatattaaccaaaacagttttctttgtttctgttgtttttcatttacaaatatctacctgtatgttctttttttagcatctctacctgtatgttctgttcttgtttgtgtgttttttttataaaagacaatgttatctgattttttgttgaaaatatctttctgtattatttgagagaagtgttcttctgaaagtacgtgagattttaggttctgatttatgatatttttatataacgaattttagtttgtttctgaactttttttttaatccgtagtaatatttatttttttggatacggattcagaaataggcattagctgtgggatacctacttttttttttctttctcaccttttcctttttcttcttattgttcttttcttgatggcagcattttttatttttgaaccatattattattggtaaatatattattatgatgaaaagggccatatttttcctctctgtttctgaggtcatagaaatagatttattatctgccaaatagattttcattccctaacaacttttatttgagattcgtagctgctgcaagcacagttcagttaggtggaaaataaagagtaaataattgcattgatggaagttctgatcaattcattcctaggcttaaaacctctcaatcaatagatcataaataaggaaaataatatatttgatttattggaacttggcttagtagttagtacctatcatgagttatattgagtaatgggtttgccttattgtaggttgtggatttgtactgtattccttttgtgattttatattttatgacatttgtttgtaattatgctttgctttctgtttgaggttgctgagaatctctgttggtgtcaggattgcgcaaatcagt

SEQ ID NO: 4410 - DNA, 1287 bp, Glycine max
ataacatgctttatgataattggtaaaattaaatatacgctatcaaacatacaaaggagaaaacaaaacaaatgtattccagtcttctattgaaacttggaaaattcttcgttgacaacttacaagattacacaaaattctcaattcaagaaaaagaaattccttgaaaattgaatacatatttcaccacagactgacttaatcaatacaaaaagatgcgagacacaaaatgaaaagaagaaaataattgaaagtgctacaagaagttcatgatttactctttaacccaaccaatccagaagctagtaggaatttcaacaaagcacaacaacatcaggaccctactggtcttgcatgcagccaagaaaggtacttacaggtgatcgttattgtgccacatgaaccaaacagatctcgtagttatttatcagtaacatcatcatcaaagttctttacatgaaagtttgatgatgatgttaccgataaagagctacgagagtgtttttagccgtcgctgcaaattttttaacctccagattgcttccctttgatctgagcctttccaattttagaatcatcattttctgaacaccaattgattccaagaaagaaagaaaaaagaaagaaagaaggaaaggccaaaaaagaatgcgtatggattacactgaatgtgtacatatatcttaaatttgcaacaactgttcttataacagtttttattaagtaaaaattataacaggtaagttaactaaaaagaaatttctagtagaatcaaattcagtttttttttcttcaccatagctgatctggtctgatctgtacatttttgaatttgacagttagttttacagaacctaacaaattgctgtatcgtatatatgctatgcacacaggttctattttctccttttttttattttctaaatccttctcttattttcttatttaattattgaatttattggaatttagactctttcagttcaataaactttaaaactcttgagcctagggatacaaatatattgtatgcttccatgtgaattttcttctctcaatgcttatgagttatgactaatcttgctctcttaagggattattatattgttcacagtaggggaaaaaggatttatcatctaaggaattagggttaaattaattaaattaaagaaattggttaggaattgcataaaacatggatttaatgttacttataattagttcctttccattgctggtttaatataatatgacgtgctggaaatgatcataaatcaagtaaaacct

SEQ ID NO: 4411 - DNA, 1090 bp, Glycine max
aagcaccaatgttgatgtgaaaagaaagcaaccaaaaaaagaacaaaattttgagaaaacaactagagtaatgggactttcaaggaataacatgaagacaaaataacatgttgatgcaccatgctctcgcatacaccaaacgagacccttcctattattcaagtacttggagacattaagatccccaaaagcatttaatccatggaatgcaggaatacaatattgacaaatgacaacagggtattaagatgttccctataactagcagaaaacatgtaaaacttgtcatgaggaagaatacaagcataatctccacaataaatcatgttcctacaatcctaagtcaattaatagatatgtgccagtgagttctttcgtttttctggatccgtggaatgaaaatgttctaagttgttgattggataaacttcttaataaacacttataacaagaaaaaaatcaaagataaaaccagaaaaatttctcccataaactcttataacagtttctactaacacatggaaaaacattcccaattgctattacctacctggttgcccttttgtgcacttgctatgttttcatctagaagttccaataatgatctattaatttcattctcttcaaccatctccagcaacggcattgaagataaattagagtaaaagtaacctaaaaagaaaactaacaaacttaaaaaaggaagcgaacatgaaatacagttcctttgacatcctttgatattaagattttggttaggcttgccctggcttttatgagttcacctctcatcttattgtaggcttctgcattacaagataggagcaatgagtgagcttatatcttcgggaaattcctacactgtcatttttatatttctattattaattattactaagaaacctgttccttcttgtatggttttctctacgtgctgaagaaacattcagggtaaaattaacagacactagcatcttttcttcaattcaaatataaggatccaaaacaaaactcggaacctgtgttttgttcagcgaattgaagctgtcctaactccaatttgggttgcaaaaacatcttctcatccaat

SEQ ID NO: 4412 - DNA, 1119 bp, Glycine max
ccagcttgcatgcctgcagaaatttgttagatgctgtaaattgtgtcaattcttacgctatgctaaaggatccaaacctttttttttggcgtgtttataccaaaagtgagacattgtttgctacaccatcgattcttattttctaagattatttttgtgcacagcattggtcatgctctgcatctaaattcataatacatcttggcaaagccattatttattgctttctatcattgccgattagttatggtctcgtatttaattgggatcagtttagcactgcctctgatgttgcggctgtaaaggactgctttatgagtctgtacagttctcaggttgtaaaatattgatatatatatatatatatatatatatatatatatatacacacatacatttttttttcttctcttttgatatcctttactgtttccctttaaacaccctcctcctaggtactgaaaaggctacattatattgatctctggggtagtaaaatatcaaacaaaggtgcttctgttctcaatacattcccaaagttgacctatctcaatcttgcttggaccagtgtcacaaaattgcctaaattatcatttcttgaatacctgaacatgagtaactgtactattgattctatacttgaagatgataaagctcctttggcaaagcttattctctctggggccatgttcatgaatgaagctgaagctttgttatatgcaaatacaaatttcctatcctttttggacgtggccaattccagctttcacagattcttcttcttaagtaaaatgaaagtgatagaacatctcaatctcagctcatgcatgatgggggatgattcagttgagatggttgcgtgcgctggtggaaacttgaaaagtctgaatttgagtggtaccagggttagttctgctggattagggattttagctggacatgttccccatcttgaaattctgtcattatctcagacaccagtggatgacactgccatctcatttatcagtatgatgccttcattaaaggatgttgacctgagcaatacaaatattaaaggtatttgattagttgacaaagttgttactattattatgatttataaattcatgttccgta

SEQ ID NO: 4413 - DNA, 961 bp, Glycine max
ctctagagtcgacctgcagcagtacaatagtcgtcttcagtcagatcttgaaactgttaatgaagcccataaacgacttgaaacagagaaagcaacaattgttgagagccttagcaatgtaagaggccacaataaggcattgcaggatcaattggtgtctcttaaagtaagttgtatcaatatatatattttttctcatgctatgaagtgtttaatgatgttttgtcaatggagaatgttgtttcgtgaatttttcctgttaattttaaaaaatatttaaaatcaagtggaatatgtgatcattttgaaaattattttgctacagtgggtgtggaatggaagtgaataactggatattggtagcttaccaagcagtttattgatgccaatgtgctggcattcttcttcaagcaagcactttaattttaggttgtttataattcttaaaatgtcataactaaccttgttgtgaagagactgttgtatattactattactattattattagcattaattccctgttgttattgtgagtatcttgatagtctctcttttgtgtgtttgttgcctctgttttttactcttttattttctgttttcaggtttcacaagacgaggctataaagcagaaagaaattttagcaaatgagctcaaatgccttcgtgaagagttaaaacaaattagagatgatcgtgattgccaattgggtcaagtacatgctttaactggagaaatagcaaagtacaaagaatatacagggaaaacatgtacacaattggatacgttgatgattaaaacaaatgctcttgaggtttgttgttttgttttgttctgtttctaccttttataattttgttcttttcttacataaatccaccgatttatgtaatgtggggtttctttataggagacttgttcatctcaaaaagagcaaatacatatactgaaggcatggcaag

SEQ ID NO: 4414 - DNA, 1154 bp, Glycine max
aagatagacctagatatcgtaatagaaaaggtgatatctctacaaatgttttaggagtttgtggtccagatttaaggtttatatatgtgttgcccgggtgggaagggtcagcaggagattctcgagtattgcgagatgctttgcgtcgtcaaaattgtctccatataccaaatggtaatatcatgaaatgatgaaactttatttaacatataaaagaaatatgcacatttttatatataatattttttttaaccattgtaggtaaatattttcttgtggatgcggggtatacaaatggccctggatttttagcaccttatcgagggactagatatcatcttaatgagtggatcggaaacactcctcaaaactacaaggagttatttaatcttcgtcatgcaagtgcaaggaatgttattgaaaggtcatttggggtattgaagaaaagatggagtatattaagaactccttctttttttgatataaaaacacaaataagaattattaatgcttgtttcatgctacataatttcataagagatgaacaacatagtgatccaattttggaagcccaagacttggaacttttatctgttgttgacaatgagttaatcaatcaacaaatggaaagagtcacaaataatattggagatgaagtcacaactatccaagcaattgaggaatggacaagattccgtgatactttagcaatgaatatgtttgccacctatcaaataagaagaaactttgattagggagatgtttttagtggatttggattttgtttcttatgtgtaattgactctatactcatgtatgtgtgatactttggatttttgtatttcataatactttggattttgttttctttctatgtgtagttaattttatactttcgtagaatgctaatttggcatgtctcacctttatatatatgtaattatatatgtgagattatttttttttgtctagagaaatggaatcaagcaatgtgaagaacaagtcaggtggaaaaagaaagatgtctagtgaggacacaagaagttacttcgcatggaacttggaaatggagcatgtgctagctgatgtgcttagagatcaaagaaatttgggcaataaaggtgatggaaattggaaagcagtagcatacagta

SEQ ID NO: 4415 - DNA, 1028 bp, Glycine max
agattctcgagtattacgagatgcattacgtcgtcaaaacaaacttgaaattccaactggtaatatttcttagaaataattttttttctttttttttggtctagtttaagtctatgtttgttattttaaacattgtaggtaagtattttcttgtggatgcgggatataccaatggtccgggatttttagcaccatatcgagggactagatatcatctcaatgagtggattggaaacacccctcaaagttacaaggagttatttaatcttcgtcatgcaagtgcccgaaatgcaatagaaaggtcatttgggatcttgaaaaaaagatggagtatattaagaactccttcattttttgatataaagacacaaataagaattatcaatgctagttttgtgttacacaatttcataagagacgaacaacaaactaatcaacttttagaagttcaagacttagaattcttatctgttgttgatgaagagttagtccatcaatcaagggaaggagttcaaaataatgtcatagatgatatcacaactattcaagctaccgaggaatggacaagatttcgagatacattagctatgaatatgtttgctaactatcaagttaggagaaactttgcttagggatagttcttttttaaatgtaatttgctattgcagacaaactttgtgtgcgttgttactattgtacttttctattgaagatagacttttttgtactttgctattgcataaaaactttgcttgaaatattttctatgattgtgcagtggactagtcaaatgaataaagtaggttatatctaatatttgttatgtgcaggttgaataagtgacattaacttcaatggagtcatctaatgaaaaaatgacggacaaaagaaaagttttaggaaaaaataatgaggaaacaagaagttattttacatggaatttggaaatggaacgtgtattggctgatgtacttagagatcaaaggaatttgggcaacaagggtgacggaggttggaaaaggtcagca

SEQ ID NO: 4416 - DNA, 1226 bp, Glycine max
tgcatgcctgcaggatgtaagttttttatcatgtacacaaaatattgttcttgtagccatggctatttggcaatacctatgttcatactttgctatggaagacacaagcagtgtagaatttaggtatgcaggggattcatcaagttgctaaaataaattgaaaactgtttattcttgtactatttttttgataatttttttattacttggatgcttgatatagtgttatttgtgtggttgaaactatgacatcttaatttttatatagtttcctctggagtagattttgcagttttattttggattgttcggttatcacaggccttgatatctattgatcctgcccgtgcaagggatgatcctgtcatagtgaaaaatgtcccttactataaggctaagaaggctctggagacagaggttatgaagattgatcctccaccaagaccgccaaattggggtgtacgtattcactatcttcatgttatgcttgctagttattcctttttagttattatgatagtccagatttgtctatgcttaaataatgtgcacaattttctttcaatttataatgtgcttttgatgattgcacttgctgaattctttctcttccactggctataatgggcatatataatcagttgtatggacttgattggcatggtcggtataactgaaaaaactacaaacctctttatggcttttgcagtgaatgggtcaaacgttggtgaccaacctgggatagtctaacttggtttaatattttttttaagcttcatgtgaacactgtacaaggatgacccttgtgaagtgcattctgtgattagaccatggctcctgttgagcaatgttctcagttttaacataaaaggtagaccggcttgtgcattatccacgcatcaagcccaaagggttcttgcatgagggagcatattagagatgtagtataaatataaactcattcacatgtcttcagcttatagcttaagttttggggattgtcagttcatgacaactttatagcaaaaggaaggttgaatccattttgttcaaattaattgatgattcattttggtgcccaataatttgaattaaaaacaaacggtgagaattgaaatggcaaaagtatctcaaaaacaaccaggtagtttaaacagctgacatgataatgggtaacagaatatagaaacaaatatagtttataccaaacatgataagacttaact

SEQ ID NO: 4417 - DNA, 883 bp, Glycine max
aagaaaatgatactgtttttgtgggtgaggttgcttgggacaatgttcttggtgctgaaggccttgcttagaggttttgaattggtctcgggcttgaagattaactatgctaagagtcagtttggggttatagggggtgttgttacatggaccaatgaagcagcctaaaccctgaattgtagacaattggaaactcctttctgttacttgggcattcctattggggctaaaccttcaagcagtttggtgtgggagcctttgatcaaaaaatgtgagtctaaactatctaagtgggctcagaaaaacatatcaatgggggggaagataactctaataaactctgtcctcaatgttgtaccaatatatttattatcctttttcaagattcctcaaaggatagtaaatagactggtagccttgcaaaggaattttttgtgggggggagaccaagaacataggaaaattccttgggtaaaatgggagactgtttgcctgcccaagtctgaggagggtctggggatcaaagatatctctaaatttaatatagctttgttgggaaagtggatatgggccttagcttctgatcagcagcagctatgggctaggattatcaattctaagtatggaggctggtctgattttcagtctgttcgtgtccaaggggggcattcatactggttggagggatctaaggtagctttttcaccagactgatcaaagcatttttcacaatacatgaacctgaaggttcggtgtgggggataaagtcactttctggaaagataatttttttggggcctttattttaaaaagaaaatcaatcgttgtgttttcattaatagacaggctttggatctcactttaacgtatggtaaaattcatt

SEQ ID NO: 4418 - DNA, 1024 bp, Glycine max
acaaatctaccataccttcaaatcagctgtccttgcatgatccacagctggtgcaagatcactgtctgaagccaatacaactttatcatgatcttcgtcttcatacaatggcaaatatggccagctttccttagaagagggtaacatatacactcaacctcaagaatataaaatataatgtcttgaaaagtaccagaatttggggtatgttgttaggatcaatatcatcaccaagcctctgaaggactgaagttataacctctgtcatgctccaggtatctaaacttgcaagcaaccatacaaaccactcaactgatagttttctaacataattttcttgaaataagcaaattgcaggcaagaataagtaactcagaaagaatgtaggaatgcccttattcaaaagaaaaacttgagcaaacaagttttcctataagttaatactacatccctacctatcaatgaacatgcaacacaatcatattcaagataaacttatgaaaggatagatatgagcatatattgaaaccatcagttatagtacactgtcgcagatagaatgaaagtgcagataaaaatctgattggtaacacgtgatagtttacataccacatatgaatctgtgcattcagcccttcttatcttgtattttgaagttaaatgtattgggcatgcttgacaaaaaataaggaatggatctcccagtttatcctccctcagaagccactctcaaggaaccgtcactggtgcataatcaatagtgtgtaacaatattaaaaaattggaaatatttctccaaacaacttaaatgtatataaccttcgagtatcgtcgtcatcatcatttggggttaaggccatggctgaataccaaaatcttagcatcaaggtggtggcagcttcattattcccaacctaattattggaagaaaatgacactatcattatttccaacctagttgtaccaatcacaatgtttttttacatttgttggtcttattccatcaggaactgcaggcatgcaa

SEQ ID NO: 4419 - DNA, 947 bp, Glycine max
ttgcaaacagaagatgggagagagaacaaggacgcagggatgcaacagaggatctgtctgaagagttgtcagaaggggaaaaaggagatggcgttggggagatgatacaaattgagacatcaaagaaaaatttccagaggcagatttccaacttggaagtatggtctgatgacaaaaaggaaaagaagctttacattgtcctcttaaggtatattaattctccactttctcacaatcattttgcattcaataaatgtgtttagccaaatttcttgattgtgtattactaaggtatattgattgtttgactatgacccttgtcgtttgacagtttgcatggtttggttcgaggagaaaacatggagcttggtcgagattctgatactggtggacaggtatttgacattgttacatgaataagctgtgaccctcccatttagtgtgtgttttgatgccagttggtgagataaattattagatggtctgagatgatcatggtcctattaatctttacgtatatgacaagtaatgaactgttattaattctttttcataaatgaaaaaattcgggtacatgtcacatagattagtcaaaactatggataggtgatagttctaaattatctaataatttgtcagttgaagtagcttaaaaatacttttactctcaaaacaatcaatcttccttctcattttttgtcttggaattcaagaatatgaattggaattcccaaaaacatattcccaatttttatcaagcatagcctaaattggtggtcaaattcattgattcaatttcaaccaatgtattttttccagattaaatatgtggtagaacttgctcgtgcactagcaaaaatgccaggagtgtatagagtagacctcttcacacgccaaatctcatctcctgaaattgattggagctacggagaacctacagaaatgct

SEQ ID NO: 4420 - DNA, 1128 bp, Glycine max
atggtccttcctcggtgatactatgacccaagggggtctgattgtcgagcaactcatctgaaatgtcacttttctgatcattgatttttccacttttgtcttcttcaaagctgtcaatacaaccagtgttcacacacgcctcatcttgatctccttctgcactgtaaagctggtcattttcttcagattcttgggcagtctttttcgagaatttatcattagaatctgggtctatcttctcactattttccaaagtataggatgaagccaacacttggatgtgactaaattcctcactctctgtgagatgaactgggtcattttttgctatctcactattactctcatggtcatcatcatcttcatttgaaaactcaggggctttaacacttaaacgtttggtatactctggagactctagagaaaaagaaaacaaaaaattagctaaagcagaacatatagcatcatcagttgactgctttcctttatctttcgaagagtttgtttcttgtcctgatgcatcaccttcttcatcctcaccatcaagaaactcaggagctgtaactacaagacctgggagcaattgagtagtattttctgaatcagacatgagagcagagacatatggtacctctgtgtgtaaatttttctcatctgattcattttccctggtgacagtataatcaggacaattttcacaagagttggcatctgattcaatacaagaagcatcaagagcagaaattctaggacaagatggcaaagcagaagtctgaaatttcttagtcagagtatccagttgctgctcgacttgctgaagtcttgcctcaatgctgctcatgggcattaccattttctcttgaaagccaagacagatttcttctatcctgtccatgcgtgatagaagctgttccagggccctttcaacattgtcacccaaacaatcaccatgattgctctcaggaatagaaccttgtgacggaatagcactacaattacatttggttttagcaaattgaaagggaagagcagtatcgttgttctccatttcggcaatttttgagggtacaacactgaaagtgttgtccattttatcagtttgtgagggtactgcaggtcgactctaca

SEQ ID NO: 4421 - DNA, 941 bp, Glycine max
ttgcatgtcctgcagcagaaaatacaaattcagttatagtgttagaatctttagcagacaaggttgttaatttgttgatgaattacatttgtaatgtctatcaatagcatcaagaatgaatgaaaatgcatcagaatttgctcaattgccttagtcttaatagatattagataaacttccctaacacacaacttgtgttttgtttgcatcttaataaatctttttttttgcttagaaaaaaaaaattcaaaattgcagaaggaggcacaatgaattcctcaggtaaaaattgcatgtgagctcctaagccagagccagatatatttaattaaacgcatgatatatttaaacttgttaagataaagataaatacatagcagtaaatatacaatttcttagtcaagactaagaaaaattgctcctaaaatccaaataatgtaactatttagattcccaataattatatttatagataaatacttgacactaaagtatataattctcagttttcttttataaccttccttgccaaacagtggcacaatactatcatattcatgacatggacaatacttttgtgaccagaatgggtggcacctttattcgaccaaaacattttacgaatctgaaattaaaataaaaagctctttaatgttaatatagctcctaattaactgtgatagatcacccataatctttttacaagactaataatgcttaatatgatactctcttacttattaattataagattcttttaaaaacttatttttctttttatattttttttaatttctagatacatacatcagtttttttttctttacatatttttacttaattaatctcttctcaaatattattgagaaataactaaatggatagaaaaataagaaaatagtaattttattaattatttttttaagggatgtgaatgaatg

SEQ ID NO: 4422 - DNA, 1029 bp, Glycine max
aagtctgtgatctcatgattctctggactctccaccaagaaactatccaccacattctcattgggaagaagccaatgttcaacatcattttcatcaaaatcaggtgcaacaacaaactggctcaagtagttcctaagcagccgagtaacagcagggacatcccgaagctccattttcctgaatccaggagtaaccgttgaatcaggcaatttgtaaagttttatagtgcggctcatcgtcatcctagcaccaagccttgaaaacccaacatcaattagcttcttcggattcaacgatcggtgccaatattgacaagtcgtgattggcgttggaagaacaactccagccgtataagccgcctgccaaatattctccaaatgaaccctcctggtgacctccttgatcataacaggtgcaagtctctttgacctgagcttcttatgaacacacaagaaattgatctcagccatcttcacaacctcctcattaaccctgatcctggcggggatgccactgatgaaagcaaccaacttctttgacgtcttggctctcacgccaatgtgccaactctggtaatagcccggaacacgcaacgcccaacttagaaattccttggaatagttgaacctgaacatgttctcatcatcctcaacatagttattcttgagaagggcataaacctcatcacagatttcctcagagtccatgtcacatgttgtccactcataagcattaggaaggttgtaaggctcctgcttaacctcagataaaggtgtcgggggctcaatcgggccctcaggcaaacttgagtccccaacatccttgtattgccccacaggctgagtttcccagaacttgtgtctcttaccaagagacattgaatcttggaaactttgcacaatggtttccaacgacgacgcgttgttggaaaccgccgagtctccgtcaacaagatctggttttgcatttggagacccagatggaacactgctatcacccattatcagttatatcaaaaaaaacccaact

SEQ ID NO: 4423 - DNA, 1197 bp, Glycine max
gattcgccagcttgcatgcctgcagcaacaacttatgggctcttttttgtcacgcatgtggcactggccactagtgtttctcatttcttgccgcatcagcaatcaatgattggataatgtgaaagaagattcaagttcaatggattcaatgcaaataaaagacaacactgtaaccaattttacttgctctagtgcttacttgaaactgatttatgttttgtagtcaagtttggttttggatatatttaactttgctttggtttcaatgaaaatatattgttcattttatatttgagtcttttcatacattcatctgaatcagtgtttattgttccatattttactttgtatcctgaaatctctggatttaggaaggtagcagtctcaacttaatgcttggtaggtatagatttcagacctcatcacattttaatatttcattaaaattggtgacaaaatctctcgataattcatctttcttaagtcaccaatgttctaagaaatctagaatttggttattgtcttcaactattttactagatatgactgctactttgcaaattttaattgatcattttgatttcaaaagcgcaaaaaataggcttctgtgtttttcagttagttctttcatgaatataaactgaggcagtatacccttccccagtagtttaaagctgaaagttgaatttcgtatttaaattaagtagttcacattatttatgtgatcttgtgcttgatgcaaaattagatactaaactacaaaaataaataaattgagaacatattataattagaagtgagaagggtaagccaagtgtgcttatctttatcaccttcatcaataattcagaaaagctctcaaagtttaccaacagaagctttctgaatgtgtttaaatttacaactttttcccccagttatattagaggtgtaagaattgatgatactaaaaccaaattgctagtcaaattgcaacagagcttgtgatttcttcagtgtaaaatcacattctaatagtattcaccattcttgtcttgtccattcattttgtgtttaattaatcattgaatttataagtacatggcaccattgctgtaagcttgtctacatctagttcaaataatgacaatgtaattcgactgagattcacagatatttacaagcattaaatttttcctgcaggcatgcaagctggcg

SEQ ID NO: 4424 - DNA, 1257 bp, Glycine max
aacaatgtcttaactgttatgtgataatagtattattataagaatttcatttttttaacccatattgatgcaaagtattattaactttatcatatgattaattttattaggaaaattttacttatcatttttaatagaattttttttaattatatttttttatttataagactcaaactcaaaattttgcataaaagtttttacattgtaaatcaattataaatattaacaaaatgaattttaaagtaaaattttaaaaaatcaacaatttgactatatgtcacgattcatgattatataataatgaagatgttatttgttagtgtattttggttaaatttttattaaaaatggattattgctagacactggggagactattgtctcatcaatttccaattcaaatgttttttagaaaattatttatggcattctctatcaattaagccaaacttgcaactcaaattaatttgtataagatactagtggtttacctactttaaatataggggtgaagaagtgtttgtagatgatactaaagttttggttaaaaggcttattgtccaatggttaacatgtagtgagtgataatgacaattgcagtggtgtgggtacaacagccatatctttggtgtcaagtctcataaatatttctatactaacggacaaatggctttcatgttgagaatctagaggaggagctgacatgggaattgggaagtgtggactgttgactagaaatgtgtattatctaatatcaatatgttaaaaaaaaagagagaaaagaagcatgtatttatttttcaactttttccatgatataaaattataaatcttatattaaaaccttaagaaaaatatattcactatatgatcatttaacctttttatttttgttgacacccatgtcaagttatttttttatttttacatattacaagtacagtgtacaaaagagaattgttttttatttgagaaggatgttatgtgtaataaaactctctacaagtatttagtgtaattatataattattatgatttgaatttaaaattatgaattaaactttttttataccaaactaataattaagttaaaataatcttgaagtagatcattcatacacgtacactcatgacgaatatgtacaatttaggatttacccattgatataaccaaattagggactttgctctaatatttgtaatgtatgataatgaattttgaggacaaggagaaaaacacggagtcatgtcaca

SEQ ID NO: 4425 - DNA, 889 bp, Glycine max
tcgacctgcagtgtgattatcaataaggtacagtaagtctatccagctcaaaacacacatacttctaaattccataaataatcctaaatccccatctccaaaacaccttacctattgttggtaggaaacatcatttaatcagatcactgtttgtgtttgattcctcaagttgcttcttcaatttcttgtactttttcttcatgtcattaatgtttttttccctgtttctttaaaacctcactaatgttgccaatttagtccttgaggtggcagcagctcatttttttcttgaaataattctgtcctctttggaaagtgaagcatcaactctaggaatcaaagacaacacagcagataaacgccccctcatacactagcccatttaagctaaaagtacgaacaatgaacaaaactaactgcctaccttgaagaaaaattaaacttttagctaaaagaatggtggtgacaaggatcaaactcctaaccacatggtcatagagtatagaatacactatcaatgaccaactatcccaaaagcagcctaagttgtcaggtgaactgaaagatcatgaatagtttttatatctaacaacgtcgaatgaggattatgttttctagttatatctcataaggaaataaaatcataccttgaaagaaacataaaatctcaaatcttccagctgctgattcaccatgagaatatatttctcacttgcatataattttagaagttcttccacctgtgccactataacataattatacgatttccaaatggctttatttgaacaaaagaaaaaatcattatgaacctcttggtttccttcataaaattgtgacaatagcagcaaaaatgatcctataccataaaatgagatctctgcggggg

SEQ ID NO: 4426 - DNA, 1021 bp, Glycine max
tgcatgcctgcagctatgatttctgcttcagtagcatcacctccttttcctaggcaatattggcacgtagagactcattgaacaaaactggctcttggcttacaagacccatttgctgccttaaccacttcagttgtaactctctaatttctaccccatcaagtgtgatttgtcctgaatcaggatcataaaatctttgcaacaaggcaatcactgtggattttccacttccactttcaccaacaagagccaccgtctgaacaattttgctagtgataattagttgttacacacgtgcatttaagctaccttttgaaatgaaatggagttaaaatataaaacacaaactttaccttgccggaatggatagtcaagcggaggtctcggaaaatctgcatatcaggcctagaaggatacttaaagctcacatgacgaagctcaatttctcccttaatgctatccagtgtgctaccagacgcatcactggaatctatctttgacttcttatcaattattccgaatatggaagcagtagctgacttggctttgcttgagtcaggagcaaaggagcttgattgggagactccaatagctgccatagttaatgcaaagaagacctgcaaaacaagaaaacaactacatttttaagaaggaaaaacataatgttgaaatataatacagtaatattctttatacacattttttccctctcaaaagtttataatgaatgttgcaagtatgaatgagttggtacctggaaaacatctgagaatgttgtcttcccagagtccataagtctagctcctgcgtagaaactggttgcataaacacaaaacagtaagaaaaatgaaaccccaaatcctgatccactgatcaacccttgccgtatccctgttttcattgggccctcacatttcttcttgtatagttccataaccttgtcttcagcacagaaagaagcaactgttcttatgcttccaactgcatcattagcaacttggcttgcttcctcatacatcat

SEQ ID NO: 4427 - DNA, 1050 bp, Glycine max
catttgccattttttaaataatgttcatgtgcagattaagcatgcatagaacttaactttttgattgggagaaaactattacccctttaaattttgcttatcctttttgtagatagatacatctatttcgttccaagtttatccttaaaccttgcttatgtcaatagaaatcatagtcccttgttttttttaaatcatcttttcctttattttttgagttttctaaaatgaagaaatggaaaaaataaaaaggaaaaaaatgtgcacatataaataactctcttctgctatcaagtggtgcatcatctacataaagtaattctggttatgcaccttcacaatgacttcattcttcatcttttttgtgctccatctaaacaaacaattgagattattgctgttgataattcaaccctaacttaataggagccaatacaatattatgtagtttaaggatcaattggggcaaaatagaggttcaagttatctatttgtgaaagaggtaaaatttaaggggttaaatgatctttttccatgactttttcttcctcttcctctgaaagatgctcaatattctgttacaggttgcagatttgactggagagttgatgcgtttagcaataggtaggatatcagatggtgaacttgagtttgctgagaagatatgcagatttgcacgtgatatatacagggagcttacacttgtagtgccacatatggatgacagttctgatatgaaaacaaagatggatgtaatgctccaaagtgtcatgaaaatagagaatggtaatgcattggttttcaaaacactgtttgctagactgaaagttctatctgttatgtttgatgccttaataccttattactgcaagcacaagtagaataatctactgactgattggaatttttttcatatcatctttaatttaatgaaattggttttccatccactcaagagattcttttcttaagttcatgattttggatattgcatatttgatctgcattcttttcttaggtctaaagtcattctcactcttaaatgatgat

SEQ ID NO: 4428 - DNA, 973 bp, Glycine max
acaataagcaagctaattagtagttacccaagacttttcccgaacaactggtttgctcaagaatatttgtagcacgtattaatggtgccaatggtatcaattcttaaatgaaatgttggtcataccttccaacgtataggttttcatccaaaaaatatggaagcaaaaatagccactatcacaagcgcgagagggttgaaaacacatgcatacaatggacctttaatccgtacacaccatgcagtaacaataaccactaatccagagtacacaattccctgccacaacatcttggtttcttagtaattactaatttttagtatactagttcaccatccaattaatgcaaattttaacttacagaaaatccgcagttagaagcctaatatcccaacccaacttccattggctccaatccttcacaacacatagggctaagactgtggcttgtattgcccccattaaggtcatcagcgctgtacttgagtaatggcttggatattcgatctttactcatcttagtctgtcccatttagtgattattcatcaacaacaacaactacactttttttttttttgccaacaaatagaattataattagataaggccataagggtaaacccttaacacatcatatatttcatcaacatttttttttatcgctttcttctaatcatgttatttatcttattgcatgttatacttatatttttttttttctctctttctcaattagcaactgagtgcccatgaaatatatatttctctttaagtactgagatataacaacaggaagcttaattacctgaatgatgagccataatgaaagactaaaaacacttccaagacaacataaaacacctagccattttcttccagaaacagcatgcgatgatccaaggtggccattttgatttttgtgaaaaaatatttatgtgcaaagtcaaaatgtcaatttctaaccctttaaaa

SEQ ID NO: 4429 - DNA, 1245 bp, Glycine max
tgctagttatctgaattgtagaatcatgcctctgcctttctcttatttgggaataccaatcggggctaatccaaggcgttgtgggttatgggatccaatcctaaggaagagtgagacaaaattgtctaggtggaagcagagacatctatcttatgggggaagagtgaccctcataaaagcaactctaacctctattcctattttctatctctcttttttcagaattcctaacagggtagcagaaaaactgacccaaatccagaggaggttcctatggggtggtggccttgatcagaagaaaatcgcgtgggttaaatgggatacaatctgccttccaaaggataagggtggcttggagataaaggatatcagaattttcaatagagctctgttgggaaaatggagatggaacttgatgcagcaacatgatgatctttgggctaagattctgcattctaagtatggaggttggagggctctagatgaaggaacatcagtcaccaatgaatccatatggtggcaggatttaaggtcagtcatccatgaacaaggtgtgcatggccttgcttcaatctgcaatagagtggaaagtggggtgtggggatgaagtaaggttttgggaggactgctggcttacagatcaggaatccctaagggcgaaatatcccagattgtatcagatatcctgtcaacagcagcaagctcattcaggatatgggattccactcagcaaatgtttgggaatggaagcttgaatggagaagacacctgtttgacaatgaggtgcaagcggcagccagttttttggaagacatctcgtggggtcattttgatcgttggacattagactgttgggtttggaaaccagaacctagtggtcagtactctacaaggagcgcataccgtatgctactagaaggagcaacagatcagactgtggatgaggctttagaggacctatggcagctcaaaatccctttaaaagcaacaacatttgcttggcgattgatcaaagagagaatcccaactaaagggaatttgtggagaagacgggttcagctgaacaatttgatgtgccccttctgcaatagacaggaggaggaagcctcccacctgttttttaattgtccaagaattctccccttatggtgggaatccctagcttggaccaaaactgtgggagtattctcccccattcctaggcagaattacatgcagcacacgcttatctccaaaggaaagcat

SEQ ID NO: 4430 - DNA, 1116 bp, Glycine max
aatcatgaagaggtccgaaacgtaagatagttaagttgttcatatctggagctatatatatatatatatatatgatggctcctgctggaatctcttctcatatatctatacctagtgtccgtacttgggctttattaggatacaaatattattgcatcatacacttctctctgtattgtttccactttacagtagagtttgatatttgtgtataactatattcttatttattccacctgctgcgtactattttatatttcttgttggatttactgttttataatacatctctttcgagtcacacggtaaacaaaatcataatcatagaaagttgaaattgaaatttaatttacataatactttgattcaaatttaaggggcgcatcgtgaaattttcctgttacgtatgtgccaatcgtcaataataacttctctcgtactaagcgataataagttcttaaatactggatagagttaaagatatattcccgttaaaatatggagcgacttgagaatgtaggttactacggcaactcacatttaaccattgttttaatcttaaaagggaaatgataataagagagagattttgctcacaaagtacatatcaatttctcttaagccataacagcttaatcaggagccatgaagtgaaggatatatttataatagaaaaatgctacatacacactcttttaaaagcccactctatcattgaagtttattaaaaataacaaagtttgataaatttcacatcatatttactaattttctcttgattttgtaatttcaataaattttgaataattaaaaaaagtgttaaaaaatatgttatagcacttctcatttacgacaaaaagatgaatagggcatggtgggagctttgacgtagcctgtcatattttagtctttaccggaaatcaagtatcaactataataaacattaaatggcatcttttcacatgtattatgagtaggattgaacaactagttgtataaatatccatgtgatgacaacggagaaaagtttaaaagaacattctcatttgtactgttacagattctcaacattttcgtagctctaaactcttgaggtacccaactttcgttcaaaca

SEQ ID NO: 4431 - DNA, 1293 bp, Glycine max
ttgcatgtcctgtcagcttccacaaatatattcaatgttgtcaagcttatcgttattgaaggaaacacacccttttggaaagaaatcatgcataaaatgtcattataacatagttcattgaatgcattagggagaaaatgagtagtcaaaatgaagtcaattgagtataattagactttttacttcccatgggatctgaagacttgtttttgagccaaacagcacaccaggaagttgcacaattatttaccataatggtcatgtggggagtacaggtccagattaagaaaaacagaacacataatgaaggtaaacatcacttgacagcactagacaccaagaataaaaatagatgtagcccgccaatgaagctcaaatactccataaatggcaaagaattgatgacatgtatctgatactgatacatgtatggtacttttagatatgtataagtcattcagatgtcgtatcataccagtgttgcatcaagtataggcttcatagtaatcctctttgcttagaaaaagaagaagaagaagaagaaaaatgtaaaacataacaggctaaggaccttctccttagaacaaagtaatcaatggcctatagcagcacagagtgtattcccacctattaattgcaatctatttagaggataaccggcatatcacaccaaaatagatttagccatgaaattgaactgaaagacatgtttatgtaatctttctatacttccactaacttcaccgaagccctttgtatccactaatcgaattacaatcatcaaagaagattcgttagccaaagacatacacacacgtgaattaaaaatcaaattctcttcaatgatacatacgaatcatggggaaaagaacattcaactccagaatgcaccaaaactcagaaaatccaagcttcactatcacattaacacgtaaaatcccactgatgaaaaggcaaattcaatccaaagcaaaagaggggacacaaaactgaccagatagagagcatggcagcgcaggaacaccgatttccttccgttctgatcacgaagaacatgagcagctctcttatactcacggcaatcaaaataggactttgccagaaggtagaaatcaccatctacaagctcatcttcctccatcgcaggcgtggcaacatacgaaacacccgcgattggggttcccgtgatctcgtgagtcttgtacttcctgcgaatgctcgaactcccacgctgaaatctcgtgttcgagggagtgaacttggcagggtcttgctcaatacccaccaactgtt

SEQ ID NO: 4432 - DNA, 996 bp, Glycine max
aacgttttctatcattttatattttttgaaatcaaaaaacatttccacaaacaaacccacccttagttcactcccttctaacatactgccagacttcaatgtgtatattacttgctccaacaactttatattgctcgtcttctataatgctacagttacctccaaaatctttaaaccaaacatgatgtcaatacgagtgagaaattcaatccactcctaacctctcaaaatagaattgattcaaataggtatatcaattataaagtacaaaccaaacccctgccaaaaatactttgctttaagggggtagatcacccacctttgccaccatatttagaacttatcaatacagaccattcaatgccaaagccatttgccaaggaaggtcttaaaggcttctaaactactaaaccaaattaccaaacagtccacaacagccaaaatgagcaaaataccatttatatttctaaacagcaaatatcaaaacaagaggattaatgaaagggagaagtgagcttcatgaaaaggatacactagcaaccacatgtttggtcttgttatgaaatggttaatcattagctaacaagactaattacgatagtgattaatatattgttgtttaaaatataaataactccatgttattgcttgattctccctatgctaattaataattaagacaggtccttaaaaagtaggatggtagcatattttgataacaagtctcatgctatcaaaaaaagaagcaaactcctcaagtaccaaaatacatgccttgtgtattcgactagacattactgttaaaatttgtcttggctagacacactaattacttacttatagtataactacagaccatgataaaaacatgctaaagatgctaacattctaacagtaacaagtactacaaattgaaaaatgataggccaaagaatccaacagttactactaaccaaacaaaaaatttgacaaaggtctgcaggcatgcaagctggc

SEQ ID NO: 4433 - DNA, 1149 bp, Glycine max
gttctggttcattgattaatcaggtaaggggtaacagcttatctggtacaccacaagggtacttttgcttttctttcaagtgtctctattcttcccctgtaatccttttcttagtctgtgtcattttataggcctctgaatacataatcttcaaacattacagacttgttgcttaatttttcatctcaagttttatcaaaacagtcagtaaccaacaatgctgtgccattattttacattacaactacctgaaaggaacatggacatatgcttctttttgtttttctcttcctttgtttttgaaaggacaggaccacgaacataatacatcaaagtctgaaaacatacgaaattttgacatgaagccatagtctagtcctatatatatatatggtataatcctatgtgtgtataaatacacacacacaattattaagagtagttagcaaatttatcaagagctttctgggagccagttatggccacatctacttcccatatctgtgcggaaatcaagagcacaaatggaagacacttcaacaataaggagggatggatattggtccgaaaccgagtgtccaaatacaatgtgagaacattctcatgaagaccacgctagaaaacaaggataggcaacattaaaaatccaatgattacaaatgatttaatacatttgcagacctggaagaggcactaagaaaacccattttcatcaaagaatgacgaaatttatgaatgtagataatcattgtcagtcaagtcaaaaaactttgtttgagttcaatagtgatgttcaatgtgaataatctgcccaagtttcagatgcacagccataagagtcgagttaaatgctaatcatcaatgcaataattgtcactctataaatactgatagaacagttatgtgaacagtatggcagttatatatgtgttcagtaactataaggtcatagaattcctaatctaagagaatagagagagaaagagatgaaagtgaggagtaaaatgttatttcattaacccaagtcactgaagattacaaaagagtatttatagacagttctgttagagagactaacagctgtcatctaactgccactaactaactaacagctgtcagataactaacttaaccaatagctaggtgagt

SEQ ID NO: 4434 - DNA, 955 bp, Glycine max
aactcattactagaaaagaatgcagttattgatcaagtggaagaaatcttgtctcaggcaaaacctgatgaacctgaaatgtttgatatgccagagaaactaagatggcttgtggatgacagaaatactttgaaggaagccttcctagagctatgcaaattgaagaaagctctatctctagcggacctgccagagcctgtttcgtcatctgatttggaatcacaaatgaaatggcttacagattctttgctcagggcccatgacaacatgcatactctacaggaagaaatttccacaatcaaggaatcatcccgtaactatattgatcagcttagtgtttctcttttgctggcattgcaggaaaaagattaccttctgtcagaattaactgatttgaggttcaaatatgatgagcttgttagcaagaaccatcagatttctttggagaaggatcagatagtgcatatgttagtcgatctttgtggtctgaacttggaagatgaagggattgatcaaatctcttccagcacttatacgatcatcaatttatgctttaaagttgtcaaaggacagagtggtcccttgtctagagcatcccatattgatgctgagttgtttgaaaggattcaaagtctcttgtatgttagagatcagggattaatactctatgaagatatactggaagaggagatgctaattagatcagatgtgaataagctgtcaaatgagttgaaagtggtatctgaggaaattatagcactgaaagaagaaaggagttctctgctgcaagatcttgagcgatcagaggagaagacttccatgcttagggacaagttgtccatggcagttaagaaaggaaaggggctggttcaagatagggacaatctaaaaggtcttctaaatgaaaagaactcagagattgagcagttgaaggctgatttgcagaagcaagaat

SEQ ID NO: 4435 - DNA, 1108 bp, Glycine max
ggttgtttacgtgctattagcacaatacttgaatcagtgagcaggcttccacatctttttgttcaaattgaacctactttgcttcccataatgcgtagaatgttaacaaccgatggtcaaggtacttctacccatcctgcatttctcatttttatggaattttctttcatagaaaaaatgtaatttccactttgaatgatggctacttgttgaaatttgaggcttaatttgtttttttttacccttcctataatcctattttcaatgtcattttgtttttgtgcatgtattcacacttctatttttcatttagagaagaattataaaacttttggtggagaggggatcctcttagaactataatgacaatgcaaactacaaaggaaaaaaaaagaaacatcaatggagcaaagctaccagaatctcccagcatatcagtcagggaaaactccttaaaaaagacctcttggtttctcccagcatatctgcctaatcttattatgtcaaactattgtgctatagaaacctcctgaaaaattacaagagttgccctcagaccacctgcaccaaagtgtagtgtatattgcacatttccacaaaaaaatttcttctttaattgtatcaagaccattaaagcttatcattaaaaaaatggtctgatgattgaggacacactcaatatctattggaagcaaactagattcactcttataagttgccaaaatgctccaagaaaaaaacccttaggtcaccttgtcttttttggctgttattgtttacctagtctaactgttcaattaaactggttgttaggccttgtggaaatattttttcctgtaacaaatgggcatggctaatggttttttattccccttccattgatgtttaggatggatgtatgatgttcttgataattcagggctttctctgcatgcttaaatttgtgtaaaatgaatgtgatgcttaagcttgtataaatttgcttctttaacttcttggactttgtatttgtgtttgtttcattattagattgtggtatgaaagccatggtttgtatattttaattttgcttgtattttctggctatattgcattatcttctgtgtgt

SEQ ID NO: 4436 - DNA, 902 bp, Glycine max
acaactatttgcaaataaaataaagcaaaattagattttcatggttatattgtttagtgtttgatgggtttattctgctgatagtgacatattgcattattggctttaccttttgactttcaagatttaattgtcaatgtgaaatgagcctcactaagacttttcttacaaatgaactacagaatggtgttaggttagactttgaggtgaggcttggagcatggtcatgggacacttctactggtgaagagcttcgtgttggtgctgggctgggagaaccttatggcataacctggtgtgcagtcgagtattttgaaaaaagtggtgctattctacgcttgctcctgcaacatgcctcctccaaacctcacagtggaaggacccttctacatcatgccatactctgtggcaatgttgaggctgtcaaggtgctcttagaatgtggtgcggatgtggaatccccagttaaaactaccagcaagactcgtttccttcctatacacatggcatctcggataggcttaccaacaattattcaatgccttattgattttggttgtgatttgaactccacaacagactctggtgactcagctttgatgatctgtgcaaaatataagcaagaggagtgtctcaaagtactgacaagggctggtgctgattttggcttggtgaatattgctggtcaatctgcaagttcaatcgctaagtcggacaattggtcacttggttttcaacaagcagtgttggatacaatcagaagaggcaagatacccaaatccagcaacactactactttttcgcctttcatatttgtagctcaagtcggagatactgaagcattgaaaattgtcattgaatcgagagcatttgatgttgactatcaagacgatagggtttct

SEQ ID NO: 4437 - DNA, 1074 bp, Glycine max
tgcaacagcggcaaattgacacaattttgggtatgttacacaaaattgcaatacaacagctccaactgcaatgttatgctgctacaggagctgtcacatgcttagaatagctctgatttgttctgttttactgtgaatttgtcaatattttttccttgatcagatgttgaaaagcataagcagctagttaaaccagccatacaatcaacaagaccaaaataaacatctatcaaaaacctcaaagggtaaatgatattatgatagtaactttatgtacaaaactggatattttatatagttatccaaatctgcataccttgatattgctgatacagttaaagaattcaggattttgaagccatggcggatagatactatgctcaaaaatgaaacagtcccatcctcaaacagttcctcaataccttcccttcttttaatgaaatcaatatcagcaatcgatgcactaaccgttcctgtgatgggtccaaccaattaaataactaactataaaccacgatgaggtaagtaaatgctaagccacaaacctccactaaaataagtcttcttcagtaacttggcagcatctgcaatgtaaaagaataaagaagataatcaataacagacaaacttttgcagagtcaaattaccatccatataagacatgggttccttactaaactgagacaacacactatgtatcaacagaattcacaacaggtatagaatacaatgaattactcaaacattttcatcctgagatatataatacaaacatagatgactgtcttgtacttaatgtcatcaagattgatgaataaacaaaagtatcaaatatagttctaggcaaagttcagaatgttatcacatcatgaagtccgcataaaattagaatatatttgttgttcacaatcattagcttaccatttcgaacaatgagagctccaagcccagttggatagccaaacagctaatagaaatgcagaagaaaaaacatcaattttcaaagtagtccttgataaaaaaaaaattaaaatacatatgctcataccttgtaaaatgagatagcaacaaaat

SEQ ID NO: 4438 - DNA, 1264 bp, Glycine max
aacttcaagtatttagtagcttctgacagtggatcttcaacctaaataggggagaacacacaagaaaaaggtgaatttctaaaatgaatatgtagaaacatcctgacattcaaattagcgagtttgataaacctgacactgtcatgcattatactgactttaacagcttttaaatatgtcatgcatatactgtatttaacagcaaaagtctattatagcattttaactggtcaaagtccatttaatttttatttttaattgaagaaaatgttatttgaaaaaaaaaattacacaggaacactacaaaattattcaaatttacataatgaatctaaaccctatttaaacatccacctatatataacagaagcaatgcaaggggctttgcaactccatcctcctgaattatgttatttgtattgtgtgtttctaaaaccttttcattttttataactattggtctcttcgcacataataatgctactataacatcctgtgatgattagatagttacagtttttctaccaagacccaaaaggcaaatatgcatggacacagttgaaaagtttttctacatgagctcatgagaaaagttttacttagaacactaaatgaaattttgacacagccaaataagaaacccaatggacacagttgaaattataaggttttgggccaagagggagggaaaggagaataatgagactaaatagagatatcttccttcaaaagataagatgtattacaaagtgataaaaaaacataaagcattacccctcaaactaaatactagatctaaataaggaaacaaatcataaaatgtaaggaaacatgaaaccaatgatatgagataatcttaatatactctatattactcaaagatataatctatattattagatattttattattctaataggaaatgaaatgcattaaatttgaacctgcaacaacttctccccgtttggatcagggtcaacaggttttacgtgccgcttcccagactttgataccccactggcacttgactcttcattcttctcttctgcctcctaaaaacaaaattaaacagtagggtaaatgcttcccacaggcagttccacagaagctatagaaattgactacaatacctttttggctcttgcttctgcctttctctgcttttgtctcattttcttcttctgagaaggaagcaactttgacatattatcatcttcctctgctgtagactttggaggagaatcatgcaacttaatatagcat

SEQ ID NO: 4439 - DNA, 1180 bp, Glycine max
aaagggtggatagaaggggtatatataaaagaaagactctactagatagaataaggtagtgcatatgtttgagttaacgttgaaggaatatctaaggtacttttgctaaagcatcccctttgtaacttctccatttagatgtgttggaattcatgctaccaatatttaaaggtatgtttgcttctccgttctaacattggtcacacaaattctaatttctaacacatcgaaatagataagttacgatgaggatgttttggcaaaagtaccttgatatccctccaatgttaacccaagcatacactacgttattctatctagtaaaagtttttcttttattccccttctactaaccctttctgcggtgcaaaaatattattaatccattcaattatcagacactgtataaacaatatatatataaagcagcttaaccatttgattggccagtcaatgtatttgaacggagaagttacagaggggctttggcaaaatgacatttgaggaattccaacggtaccccaaacaagctataaatggttaaacaaacaacgcatactaatttgtacctttatttctagatgtcaaatgcatgttcctagttcttatccttctttttttcagttttataattgggtatcgaaacttaaacataagtagatattcccttagatttttcttacaaatagtaggattatatatacatcataatagttttcctagcatagtaacacgcattccattgatgcaggtgtatgatgtcaccccatttttggatgatcatccaggaggtgatgaagttttagtgactgcaacaggtaaatggttcatcttggtcagtttcacaccattaatatgcaatcaaaataatagacacagagaaaaataatcaataaagaaacagagaaaataatagacatgaactaagaatcttttgttctttacacagagaaggatgccaccactgattttgaagatattgggcacagtgattcagcaacagagatgatggaaaaatactttgttggtgaggttgacaccaacactcttccagcacaagttaccagcagcagcagtgtacgcccaccaacacaagcacctgcctataacaatcaatcttctggatttgttgtgaagatcttgcagtacatagtgccattgctgatattggcctttgcat

SEQ ID NO: 4440 - DNA, 1204 bp, Glycine max
acccgtttccatcaaggaaatgcaactgctgcaactaatgtctcaacctggtcagggacatgctacatcaccccattacttggagcctttttagctgattcatacatgggaagatactggacaattgctagtttctcaactatctatgtcatagtaagttcatttgaagaggaatctttcttgtttgttgaagtctatgttatgataaatgaatttaatctacacccttcagtgtcagtttatattttaatgtctatgaggttcctagtcaacaaggatcaatattttgattggacaataaagcctattgtttattgttaatcttgtctgtctttacttaatatattaatctctttcaagcataatccaaaaaagttgcagtttattattattattattattattattattattattattattattattattattataagttgtcaagccaatcatacttctttttgagctagagaacaatctggcccgtttcattctattttcagaactaacaaggatttaatctaaagatatagtttcatccataatcttcattttatgttttcattatttattgcatttgaaatatttaagaatttcaatttatgttatagttgtactgtgtttcagaacattattttgaggggaaaaaatatatataaaaactaatatgagggtatgcccttttaacggtgcttgtttgtttactttgcagggaatgtcacttttaaccttttctgctattgcccctggattaaagccttcatgtggtgctaatggttgctatccgacatcaggacaaactacagcttgctttatagcactctacttgattgctcttggaactggtggtatcaaaccatgtgtctcatcttttggtgctgaccaatttgatgaaaatgatgactttgagaggaaaaagaagagctcttttttcaattggttttatttctcaattaatatcggttcgctcattgcttcctcagtgttagtttggatacagatgaatgtgggttggggttggggatttggagtacctactgtagcaatggtcattgcagttacatttttctttattggaagtaaatggtacagacttcaactgcccggtggtagtccccttacaaggatttgtcaggttatagtggcagcatccaggaaagctaggctacaagtgccagataataagtctcttctttatgag

SEQ ID NO: 4441 - DNA, 1111 bp, Glycine max
catgcctgcagccatcacacgacgacgacttcaactagcattcaaacccttgctagaatgattgcagtattatctaactttctccggtgactttttggtgaccccgtcggaatctttgcctttctcttctgtcactattctttggctttctcactgattttgttatcatcaactttcaattccaaatttgttctttgttgctttgtttgctcatgcaattaacttatagatttgttatttgtgttaaacaatatttttgttaaataaaatttgtcaattcattatcgataatcaatactgctatttcgttacttagattcttgtgtataaaatcttgagttctatacttgacatggagttgctaatgcttggagctattttagaaagaatttgaaatattaatatttgtctttttttttttaccagctaagtaattttattgtttattaatcaagaaaaagggaccacgaattacaaggtgtggttattaatattggtctttctaaattattaaatattataatttttttttgaattattaactaaattttaatattgttgtaaaaaaaactaaattttaactttttaaatctatatttaaaatgaaattttatatgtaattacttcatccaaacaaaaagtttaaaacttagaaaaattaaattactttatacaaaaaaaaatatttatgaaatggaagaaatttaattctagcaatttaaattccaaatattctaaattttctgaatttttgaaatcactattcaaacgcaagattaatatttttgttacactatctatgatgcatggaattatcatgagaaaataattgatttggaacgaactaatacttatgccacttaaaaagaaatcaatactatattctaggcaaatcatatatgcatgaaagttttgtaaatgaaaataatagacttagctgtaaaacatgtgaggacatgagaagtccaggttctcctcctcatattgaggctttcgcatctgtactgtataggtatcaaagtcaccttctagaaacctgtgcgttatgaattgaatacaaatgtttaaagtttcaacttcaaaatgcactactacaagtgaagacatatat

SEQ ID NO: 4442 - DNA, 1115 bp, Glycine max
acaatgtatcaacgacaaatgtgcacaagaaatatgaggagtttggtattaaatactgtgccgataccatggacacaacagattcacaatcggagacttttaagtcatactgctcaaaaagtcaagttgtatctttcatatgggctgtttctaggagtatacttccttctgaattattaggtactcctcctacttggagaataatgaggagaaatatttccaagttcatacacttacggagatttgagaaattccctctaaagctatgtatgcacaaacttaaaatatcatcttttcctttcctatcaaataatttttttttaaatagtcaaagtgcttctgttctaaagtatatagaagggaaaaataaattctttcatcaagaattcaagaattggaatgatgcagtccatggtgtcaaacgcaagcttctggagaagtggatattctggtatttctcttttctggttgtacctttggtggaagcaaacttctatgttactgaaagtgaacaagggaaacaagatatttactattatcaaaaatcagtttgggaaaagttggctgctagcactgtttcttgcttcaaagactggagatacagttacctggatgatgtggctgtacataatattcttaaaggtagaccatttggattttcaaagcttagacttcaaccaaaagaaaatggagtaaggatggtggcaaatctggaaggttcttcaagaataccactgctacatagtatgggagttcgaaattgcaaaacaaaggggaaggtaaaaaaacatcccaagtttaaacattatctgtctgtcaattctgttctctgtgatgcccatactattctaaaaggaattcagttcaaggagcccaacaagttaggttcttcagtgtttgactacaatgatgtttacaaaaaattgtgcccatttttggtcggccagaagaagcgatcagcatctatgcctagtctattcattgttaagtgtgatgtgttgaaagcatttgattctattaatcaggacaagcttctcgacataatgaaagattttctactgaaagatgtgtattttcttaagcagtatgatcaagttgtttgcacaaagaagtct

SEQ ID NO: 4443 - DNA, 1093 bp, Glycine max
aagtttcagggtcagatcatcaaggtaataacaagagaagaaaaacacctaattgaaaatctggacactaaatcaaaagacagcattacatacattgtctgacatgaaagcacagtcaggattgtccacaatgggtgaaagagttccatcataatccagaaacaatgctattctctttccttttgcacagttggtaatttgatcaaaagatgcaagtgctgatggaaactttagctgtgaaattaaaaaaaaaaaaaaaattaaggtggtaaaatgcaactgcataaacaaaacatccaaaattattgaacatacaaaattacagaggaaagtatgttataccagccaggtactataagcagcatcaggtgatccaatcccatgaccaagatccttggatactttattgtgagtaggagaagacgatttcatcgcatccagccaaccgctagaacgaaaatcatcaagaattcctgtcttcttccttggtattgccagcatggtaccatggggaaaggttgcccctttaggagagtaaggtgacaaaccagaaggcacaccaagccttgaccttgttaagggtgtggcatcagtaaggacagggttaagatttggcttcgggtccattggatccaggtctatgcacaatttcatagtgcagcaacaatgtaagaccttttgaggggtattcagaacaaattgaactataatgtctatcaaacttccaccactttgtcactgcttttgaggtagcagtttatcaacaaatgagttcctaaggataatgatcgtgtaattgattagtttgatttgaattcattgaatatcaagtgaccaagtaattgaaacatatgaaaacatcaacctataaactaccaaaggcaaataaacaaacaaaaagagttggcaaaaatagttgtaggaatagaatttctaataactttatggttagaatttggtaccatcactctcactcaccatggcggtcctgttagagattcaaataaccatcatggcataaaaatgaacatacccaaagtggacttgtcttttcaacagaaaaacactaaaatacaacttaagagaggtaaat

SEQ ID NO: 4444 - DNA, 1196 bp, Glycine max
agcttgactgcctgtagcgagccagtcactcaggcttttcctgctgtaattttataatttaagaaccattgttgatttataaatcactaatgagcgtcaactttactttaatttcgaaaatgattataaaaaatcaatcaccactattgatattaaaataaattattttaaaagcactagatattaattttttttggatagaaagaaaatagaaacagaatgcaaaaaataaatgaggcagaaccactgtcttccaccaaagaactgttgaattacagttttaccccatccacgttgtccgaaggttcgacaattttcttttattttgcgcaaatgtctaaaagtctaaactctgacaaagaaagccaagcccctttcccaaattaagtccgtgagatgtgttttttcctaatccaaatttaataattaaaacatcttatacctttgtctgaaggagatggaataaagaaaaaagcttaaaaaaattcaaaacctcctttcctataactttctctttaattaaagacaagtataaatagaattttttgctttcctatatagggttatacttgaagggcaatttagagaaaatatgttgtagcgacgaacctcaagggatgcagtaaagtcggagaagcgagtaaggtgagaggatgaactaacatcccacttggcattctccatttatttggtacatctctctctctttccgcttaaattcttaaccctcctctctctagtcttttctcctttgttcagtcacccaaactaagaaaattccacctacccctgttgtatactaaaataataatccttgttcatttaaataaatatttttgatgagataatgcaaggatctgtagctgaagcagaagcagaagcagaagcaggggatgaggaagtgaagtctacgctccttttcaatggcaaactctaagctgaatatcattctcattcacattctcttcctctctttctcctccttcggtaaactctccgtatagttactctccaacttcaccaaaatttgcttaattataattaacacactttgcattgtgttgcagcagaagcattagattcccagcttaagcaacaaaaccaagacgaagaagagagggttccattcgtgggcgtgaacatcggcaccgacgtctcgaaccttccagcagcctcggacctggtcgcgttccttc

SEQ ID NO: 4445 - DNA, 1033 bp, Glycine max
aatgactattgtgaattacaacaggagtatgaaaagttaagcaacaagccaaagaattcatcaggctggagtttaaattggcggaagattaagaactccttacatacaaaaccagcaggagttgaaattggagacagacaggatgcacccaagtcaccaaacaccattctacgtagactaaaccctagaagaaggctctccatgtcttaaaagtttttcatttttgaagtttcaacataaaaagtcctgtaataaaaacacctagctagccattctttatatgtagcatatagactaaattttgtttcttaagatattgttgacttcaaagagaaaagtttcttgtaggctgtagctttccatatacagacaaagactcccaaatgcagcaatacaagtatacaagtatacatacctgaaaagaaaatggaaatgtgactagattactgatacaagctcatggcccctaagaacgtacagttgataggacaccaactaataacttataagtttagcaatgaaccataaaagatgcacatgaagggaaaacaaaatgctctagcattgcagaaaaatgcaacttgagaggaaacaatatctgtgagttcaaattaaaggaaatatgctgctaatttatagaattcacaatcaaattttacttaagggtgtttgcttacgctggtttggcgattaacatgttccttctatcagtgaagtacttgatcatttcaagataaagattcttggaatcatagccatactgtttatagtgacaagatttttatgtttatggtaagcactaaataacaaaactgcacccagcctacaaacttccaaactcaaattctgggttttacattattattactattcatacatgggtgaaatgaattatattaattcatattcattttttaagataaataagttaatttatcatttcgaatataaagggttggcacttgacacaatgcatagagaagagtttataatcgaagagcaattggtctcacttcctagaacaagcacagag

SEQ ID NO: 4446 - DNA, 1251 bp, Glycine max
agcttgcactgcctgcaggagcaattgtggcatgctgctaatgcctatgaatctttgctgaggcaaaaggctagagtgaaatggttaaaggaaggggacagaaattcagcttacttccacaagctgataaatcatagaagaagacataatgccattcaaggattgatcattgatggggaatgggttcaggaccctagtagggtcaaaactgaggctttcaatcatttcaaagatagattttctgagcagaattttaatagaccaaccctggatggtgtgcagttaccttccattggtcaaagcgagaatgaagcccttgtggccagattttctgatgcagaaataacctcagctgtgtgggactgtcatggtgataaaagcccgggcccggacggactcaatttcaattttatcaagaagttttggaagactttgaagcctgactttgtgcgtttcttggatgagttttattataatgcttctttcccaaaaggaagcaatgcctctttcatagctcttattcccaagatcaaggatccccaagctcttaacgattacaggccaatctctcttataggttgtgtctacaaagttgtatccaaggtcttggctaatagattagcccttattttacctcagctgattgatgaaaggcaaacagcctttatgaaaggaaggcatattttgcatggagtgatgatagctaatgaggtcatagctgaagctaaatcaaaaaataaatcttgcatgttcttcaaggttgattttgaaaaagcttacgactcggtctcttggggctttcttaactatatgatgttaaggatgggtttttgtgaaaggtggagaaagtggatccatggctgccttgctactgcatcagtgtccattttaattaatggaagtcccacttcggagtttgcacccaagagaggtttaaggcagggtgacccccttgctcccctcctttttaatttggtggaagaagggcttacaggattaatgaggacagccatatccaaaaatctgtacagcagctatcaagttggaagtttgaaggaagatataaatattctgcaatatgcagatgacactctattctttgaaaaggctatgtcagccaatgtcagagttataaagtctatcttatcatgttttgagttggcttctggactcaggatcaactattcaaaaagtcagtttggatgcattggaaaatctgaggaatggtgtagagatgcggccctttttctc

SEQ ID NO: 4447 - DNA, 1077 bp, Glycine max
atcaaagctagcaggttgaggatgttacctgtatacctggaatatatggaactttgttccatcaggctctctagaggtaccatgcaaaccttggtctgttataacttgtgattatattatattatattatatttattatacatttctgaagttctttttaagatcataaacatttatttattttttctgtgcatgttctagtaatcccttgtgtagttttattcatattttctagaataatagtgaaggatattgatggatttgcagtttagtgctggctaaaatgtgtagataaattgatgttcaattgtatgattcggtagtaactcttagaaaaagcaactttattaaaagggttatccaggatgttggctatgaagttttgcctgagctaattgggagagaattgatctcagtctggattttaaatgtaatagtttggtatcttgggcaatgtacaagttgtttgtttgttaaattttgagttaataataaaagataaaaatgtttaaaaaattatgatttatgtaagtattttcatccaaagtttttattttcagtgatcaaattaatcacacattgaaagctacattaattattacactatttaataacttttttttattggataatgttatctcaaatactgttagattaaaaagttttatcgtatagatcatgtttacaaaattatattaatataaaattgtttgatatttcaatttcagtaaaatttgacataaacaaccgaaataataataatactatataattataatttaacggttaaaaactaatatacttagctatgtgaatgtgatttatataaaattgaactgtgtaaaatttgacttcatgttttaaacataaataataaaatttaatgggtgtagtttagtttacaacacattgaatttgtgggagaaaatatggattcaattcctatagaatatattgttggatagggatgatgaaccttaagtggaactaaactttgaactaaatgattaatgttaataaaaaaacataaatcttaaaatccaattggcgcctctagacgacaggcatgcaagctgg

SEQ ID NO: 4448 - DNA, 1039 bp, Glycine max
tgaccaatctttgtggaaagacttgagcagtgctgctatgccactaacatgaggacaagacattgaggtaccccaaagtatgttaaatagtacttttcttttgtcactcatgagaaagcttgggctaattttgcttggccaagcagccaagatgttcacaccaggtgcagtcacatcaggcttaattacatctggtcccactaggcttggtcctctagaagaaaatgctcccattactggtgcagggtcaccaaaccttgtccccataaaggaaattgaagctgttggttttttaacagattgactataggttttaatagttttacttgctgaagcccctaaagaagtggctggcaaaatatgaagatcagcgaaaagctcttctccttgattttcagcattaagtactatcattcctgcccctcctgccactttcacttcctctcccttctcagttcttccattttttcctctttcacaaacaactattttcccatgcacaagctttggatcaagggagccttcactgcaatgctttgcttcttttttggtacctgccgatttgccaaatacaaggggcaattggtttgtcttcttaccttgatataaagatgaccctttgaaaaattttccatttccaagttttacttttgtcggaaagcttcagtcagtggagctagcagcaactgtcatgatccatggagcaccatttccaactgtcgatggagagggccctgaattgcctgcggagcaagcaacaaaaacccctttcttggttgccccaaatgaagctacggcaatgctatcactataaaaaggtttgggaatactccctaaagagagtgacaatacatcaaccccatcagaaactgcttggtccaccgcggctaatacgtcggcattagcacaaccagaagaccagcatactttataaactgcaattctagaggtatacctcattccacttgctgtacctccagcctggccaaaaaggttggcatttttcaccacattaccagctgcaggcatgcaagctggc

SEQ ID NO: 4449 - DNA, 1123 bp, Glycine max
ttacgccagcttgcatgcctgcagtgctaatagtatacacttaaattccactctggtcaccaatcacacatggaattcaccctctggcctctttgcctttggttttcaaaatgttttatccaacaaggaattcatgtccgtgcttgcagtttggtttcccaaagacccccaccgaaccatagtatggtatgcaaaatacaaacaaacttcagatcttggtacgatgcacgctgtttccagtatgcaaaaaagtcttgcttttccttcagattccacagtgaagctaacaaacaaaggaattgtagtgtatgaccaaaatggccaagagatgtggcaccgtccaaaaaacaacagcattgccttagtaagatgtgcttctatgttagacagtggaaattttgtgcttctggatgaaactggcaaacacgtttgggagagctttgaagagcccacagatacctttttgcctggtcagattctggctaagcctaaaagcttcagagcccgtcattctaacacaagtttttatgatgggagtttcgaactcgcttggcagagcgattacaatttcgttctttactattcaccacaatcaagcgttacacgtgaagcttactgggccactcaaactaacagctatgatgaatctctgctcgtcttcaatgagtctggacacatgtacataaaaagaagtaacacgggtaaagtgatccgtgaagtcttatatggtggatcagaagagttcttgtacatggctagaattgatcctgatgggcttttcagactatatcgacaccgcaaaggtgagaacctatgaagcaccaatattttcatttgccttacgtataagtatcagatatgtatgtgatgccgatactcatggttacttcactgatatgtatcaatgacatacgaacatgagatataaaaacatgtttttagtaatgtgcaagaagtatgttcttaatctggattcttagaactttaattgtatgttcactagatatttagatttgtatcttacatgtattgtatcttatatatttttagaataactgtattaccatatatctgatacatgtatcctatctatgcatcatagatgatgacacaattgctgata

SEQ ID NO: 4450 - DNA, 1037 bp, Glycine max
taatttcttaatgcatgaatgggttgttcttttgctcctcgatctgctgcaacatcaggtatctttggttaagtgactgattgaagaccttttattcgagaagaacactccgtacagtagcacgaaaacatggtagcctatgataacttgttaataacatgtgtcgatgccatatggagtaaaaaaattattcttcttcatatacattattgaactttttgacatttaatttcttgtcttctcatgtcctactgagtaacccatttgttgtttatgatatggctgaagattgaagggccactcttttgtatctatataaagatatatataaagatatatatatatatatatatatatatatatacatatatatatatatacatatatatatatatatatatatcattatttcatataccatcatgcattttcacaacttataatatgtaaattgacttcaaatattcccagatgctgaaattactacaagaacatatatgtaataatcaaacttctaactcctgtcctgatttaatttgttccccagcatggctagctctttacatgtttggttatatggatatgtgaatagtttcactatagcaactgagatgtcaccaacttttttatcttctttacattaaataaacttcagtctcttaagatgtaccccgccgataaagtgattgcattaattattccagcaaaaatgtatataaggttagcatagggataagggtatgaaaattaagcttatgttttttttttttattagcacatctaaaacaataatagtaagtattttggtgcctgcttaacactttgaattttgaaaactcttattagtatgctcccctcatattcttatggcttcaaaaaccatttacacgagttctgaatatatgatttggcaacagatagattggtgttttcttaacacaagtcgataatttaagtgtggatttcctagcttcaaacaatatctatacaatatacatgaaggtcctagatagatccactgcaggcatgcaagctgg

SEQ ID NO: 4451 - DNA, 1088 bp, Glycine max
agcttgcatgcctgcagcttgaaatggattcccaaattagtgcaagaaattaaaacaaatacgaagttgcaaattacttggccataatacattaattagtttgataaaattgcacctgatgactagaaattaatgcccgagtcgaagctccaaatccaacttctcctcttggtgtttaagcaaccctattcctaattccaatgtaatgttttgctcattcttctggaaacccttgtgctcctcctcctccacatagcccttcatttcctcatcagcactgaaatcactccttgtgttctcactcatcatcttaatttggctgctttgaggactcaaaagaggaaattgatgatgagaaggggtgagtcttggtttcttgtctccactggtagaagctggggagggtgaagaagacaaagtgagacaaggactacaaagtggagaaggatgtgcatagttcaaaggctcatcagataataaaggatatggtgaagaagaagggggtggtggaagaagagttgggttattattattaggcttagtgttagggttaggtttagggcattcagaaacccatgaagataaggatgatctcaatcttgcccgatcccttctgtgaacattcatgtgtccacccaatgcttgagcagacctaaactctctcttgcaaaagctacaagcatagtttctagcaggccatgaagttccccatggatgctcctcaaaaccaaagctatgatcctctctctgtggagtagtgctgtttctgttcagatagtttccttccatggagctttttctttatcaattgtaatttacagtccaaaaatctgtaacctgtagaaagaagaattaaaagagaaccatatagtataaattatttaaaatagaaagaagcaaaaaaaattgaaaaattgactttgtttgttcccatagaataagtaattattaagacttatatggatctcttacaagagaactttggagacttcacagttgagcgagtgagagaaagtgatccaagaatggcttcatattgaagcttaacatcatgtgtactctaaggggcagaaagtgaagatctctat

SEQ ID NO: 4452 - DNA, 1211 bp, Glycine max
aaaccactaccagaacatgtttcgtacagaattacattgaatctatattggctcttcaagaagccagctcgcaaggttagtatcagttgtgcttttgttgtataaaaataagagtcatgctcatcctcctgatttggttgcttatgtggtaaaacaaaaatgaaacattgataaacttgtgcatgtaaatcttttatacaggaaatagatagtatgtttaaattatacccaatgtataagatgctgagttcatttgttttgatgaaagtaactttttttgtgcttgaattttttttttaaaaatgacttgttttttttggaaaaatgttcccagtagaaaatagcttcctagaaaacattttgtggtaaatttttcttaaatttttttttctgctgtaagcattttgtggtaaattactcccagactttctttttcttctgccactctttcaaacaatagcccactctattgtagttattaatgttaactatcatatttgaaagtcccttgaagtaatggttgtgtttttcaacttttaggtgaatcccagacacagattcctcttgttattatgacatctgatgacacccatggacgtactttagagctattagaatcaaattcttattttggtttgcaacccacgcaagtaacacttttaaagcaggtatgtcttttgacatctcttggaaaattcaatttcgatttaatatttaaatggtgaaattgtaaattcagtccctgtatcaaacactgtttcctggtctagtcccaacatgaaaaaactctacattttgttctttacattgttaacaaattagtccctatcatttattaaagttgtaatggtattagaattttttcctataagaaccaaaatgaaaaacaaaaaatggtgtcaagtatagggactaatctaatactattataactttgacaaagggcagagatcaatttgtaaatgtttttttaatgttgtaactaaaatgtagagtttttttcatatagggactaatagtcttagcctgttaggtgtagggaccaaaatttcaatttaaccattttttaaataattctatactttgcatgttattcaggaaaaagttgcatgcttagaagataatgatgccaggcttgcattggaaccacaaaacaagtacaaaattcaggtattgatggcttcttgttcagtcctgcaggtcgactctac

SEQ ID NO: 4453 - DNA, 1111 bp, Glycine max
aagtcagtgaaatagtgtttttcttgcttggtgcaatgaccattgttgagatagttgacactcatggaggatttaagctggttacagacaatataacaacccaaaacccacgccttctcctatgggtggtaagtgctttcactgctctgtcactgcattgttgttcaacattacagtctatggtcaaatttggatgaaacacacaagagaaggggctcagattcaagagctccttcttacaaaggggtctagtactatttatttaggctgtgcatccatgatagcaaacttttcaagagcaaattcttcctctccccctactcgaattctaaattttctgtagtttgcatcactattttttttgtctctaatggaaattgactaattaatgcttaatttgcagattggatttattacattctttctcagttcagttctagacagtctggcatccaccatagtcatgatttctctgttgcagaaattagtacctctgtcagagtatcagaagtatgtgtgtctgttgttaactttcactgtaatggtttgcttttgagttgaagtactaaatatgaccatattaatacaacaataatgattgactggggacaatcatgcatcattatacttctaaagcttcagatctctggtccttactggagaaacttgcgtggcattactcttgctttttaaattctcttacaaaatttgaatgcttatttgatttgtggtcttaataaaattttcctccagaaatgaattttgatcatttcaatttttcattttctgctagtacctataattgataggtgacttgaaatggtattagccttttcctttaagtttaaatctgcacttgtgatggctttctcgatgtctgttgagggaataaacattcaaccatgtatgtgaatcttctaagttttctgtttcattctccaactatttggaggtttgtctggctacatttcatcatgtcatcaagaagttgatttggattctatttgcaggatattgggaggtgttgttgtaatagcagcaaatgctggtggtgcatggagtcctattggtgctgttaccactactatgctgtggataaatggccaagtat

SEQ ID NO: 4454 - DNA, 981 bp, Glycine max
atagttttaagagttcaaataagcccaattcacttataatttataatggtaataaaatgattcatgtgtttacagccctatatatataagttttggggagagtttgttcttgatttgttcatgtcagaagaccaaccaaagccccattaggaagggttgatcaaatggatgataagtgataaccccaatagaagttgaggaagacccagaaacaagtgaaacaattagaaagccatggtagttttttatagtacacaatggcagttttgaatccatgtagctgacctgtctagtgggaaaggcttttggtgtttttgctatgtatttatctagataaagaaaacaggtactgagttgcacttaatacagaaatttgtctattagttgtgacgtgccacccatattgcttgcaaaagaggaagacaatgctcctgcatgacttttaaagcctgcataacagcagctttggttttatatttttcataattgtaataaaaaagacttcagacgtttcatgtactacttttgttttcttttattcaatatcagggtgggcatttctctggcatatataggaaggtccaattaaagccactaaagtggatcaaagtggccaaaagcaatggtgaaggtgcagaagaacgacctgttgaagctctgatggttcttaaatatgggggtgttcttacacatgctggcagaaagcaggttcagattgataaacacatcaaagaatgtttctgctcagtttgagtttgattgtattgctgttgtagttgatagtaaatgtaagatttgtgtttatgattgtctttctagttgtattgatttttttttcctttgtaggctgaagaattaggaagatatttccgcaataatatgtatccaggtaactcaaatagattttcagtcagcaatgtattctgaagtttaaattaaaaggcaatgaggcatgttatggtagatttttttccggcagtg

SEQ ID NO: 4455 - DNA, 1099 bp, Glycine max
agagcaaagcaatgctttgattaagtccactccagtctgaggagtttcagattgaggaagatgaggcaaaggaatttgaaaaatacctgtggcttaacttcaacaatatgctgacctctcgtaacagctgctggttcattagcaagcacactttccaagtgatccaacaattctttggcttggcaagaaccaaaatcagggtctgcatcttgatgatgccacaccaaagcactctccttaacttcaatattagaaccatcagttgcttctgtatacaactgcatcacaggttccaccatctttttccaatcaaggtccgcagataagtgacttgcttcccattctgaatctttgttccacctgcaaacaataaaagaagaaaaaaaaaaccttgttatactttttttgagggaaaggagggggagggagagggagttacaaattagcccaatcttcctgacattaaaatgacataccttaaaaagtacccatgttctgctgcaagtccaagcatttggcatgaagtaaaccattcactcagtgaatccctccccctcccactaacaatgaacacaatattcttgggattgttacacagagcatttaagacagagatgacttcagggctgggggttttacttatggaagattgaggtacaacagtaccatcataatcaagaaagatggcccttctattggttctcttgtatgctgaaacaatatggtcaattgacagcttcctgaaaccatgagaaagagaaacaactctgaaccccaagcccaaaccaaatccccagcatcttttggtgtaatgatctttgcaggctctctccaaatccagcataaagctgtgcgcccaatatgcaacatcatgagaactcacataccgatagtgtttctcatggcgcaactgcttctctgaaacactcattgtaagggcggcatacatagcatcggctacggcatctatgtcccagggattgacccttattgccccactaagagaaggtgaacaaccaatgaactcagacaccacaagcatgcttgtacgaggagaatcactttttctatccaatgcttcatctagttgtgcagttcc

SEQ ID NO: 4456 - DNA, 1193 bp, Glycine max
cgcacagcttgcatgcctgcagagtgcagagccttctctcctctattttggcttccaacctttttgctccattcattctcaacaacaaaccaatctctgtcagtgctctctctacccttgcatttttccatctcaataatatatcatattgatccctttatttagttactgactttctgattatctgcaaaattgataattagatctagaaatactatagagatgtgtttttttctgtcgttctcggtacgtggttgctgataaactacctcattttattattatatgattgattcttcacttgttgattcaatttctcagttctgcaaaatgtcataggtggagattttcatgaaacgttcaaatgtttcattttagttttatttccttgtgcaagcgatcacatctagctagttgcaattaagccttgtttttgtctctgccagcaatgccaccaaatatcttgtttcagttttcacatggaaattttggccaatttcttggttagggagagtaacgtactgttttgtaccacaataggcatatttcccatagaaggaatggcatgaaatcctgtgacccctatcactgtggtgtgtcaataacattttaatttattcttcagatattttgcttagacaatgagggggagcttgtggcaacttgggcaatcgatcactcgccgtcttgcccatggagataagaaggctgttgctcgccgatgttttgcctcagaagctgagctgaaaaagacagtgtttcatgacttccatgttgctcatggtgggaagatggttccatttgctggatggagcatgccaatccaatacaaggactcaatcatggactctaccatcaactgtaggcagaatggtagcctttttgatgtttcccatatgtgtgggctgagcctcaaggggaaggatgctgtcccattccttgaaaagctagtcattgctgatgttgccgggcttgcccctggaactgggacattgactgttttcacaaatgaaaaaggaggggcaattgatgattcagtaattactaaggtgacggatgaccacatatatttggttgtgaatgctggttgcagggataaagatctggctcatattgaggaacatatgaaggcattcaaggccaaaggtggtgatgtgtcttggcacatccacgatgaaagatccctacttgct

SEQ ID NO: 4457 - DNA, 1238 bp, Glycine max
agcaacagttaataaatcagcaaaacaacctatcaaatatgcatcaacagctgggtaataatgtccctgggttacagccacagcaggtccttggacctcaatctggcaactcaggcatgcaaacaagccagcactctgcacacgtgctacaacaatcacagcaaaatgcatcaaatttgttaccatctcaagtgcagcagtcacagcctcaggctccacagcagcaattgatgccacagattcaatctcaacctgcacaattgcaacaacagttgggtttgcaacagcaaccaaatcccttgcaacgagatgtgcagcaaagacttcaggcctcaggtcccttacttcaacaatcaaatgttcttgatcaacaaaagcagttgtaccaatcacaaagaccccttccagaaacttcatccagtatgtaaaattgctactatgcatttttctgtgtcttttatctttggtcaattgatggttctaaggtgatcaaatttgtgatcctacctactaccttggatcatacagaaggtagacacaaattgtgtgatcaaatcatggaatataagatcccctcttattttttaatttattttttggtaattgatccccctcttatttaaaaactatatttcaaacatatataggtagcataactttgaaattgttactgacgttggaataactcttattcaaaatacattatagatgtaagtctaagccctgtctgcccaacaaaagaatcagatggtctaagccctctaataaaaaccaaggtcacaaagttaaagatacaaatcacaacattaaaacactaaaagttgaggtgattggccttgaatatttattttgtgcaagtatctttgtgaaaagttaccatcttttttggccttgaatgctcatgtatgtatgagatatcttttgtagcttctctggattcaacagcacagactggacagtcaagtggaggtgattggcaagaagaagtgtatcaaaaggtaatattctattttctcatcatctttttttttagtaaattgggttgaacagatatttgtcaaatgaaccctaaaataaaataatgaagattgatgacttttattgtgataaattttcagcaagaacatggaactcttcactagtcttggaaaaataatgagaactttgcttaaatccatactgttcaatgtttatgcggatgactctcatccttcacataatatttctgaaaaatgtgt

SEQ ID NO: 4458 - DNA, 1215 bp, Glycine max
gccagcttgcatgcctgcagagttttgttggcaaggggactccataaatgaaatcatgactcaaacattgaagccatcagcaagcaaagtaaatggcttcaccatattttcactatttcaagaatcccttgtttttcattaatgatatctaaggttgatcaagatgaatctatatatgtatccagttatgcattttgataactgttggagctagagggcatcgtaatgaagtctcaagtgttgcaagtgtattgttcatctgatgtcttgtgtatctttcccttttattgctcgattactttttacttgcctgaatgtaaaatgcttatataaactccataattggatcaaccatctgacttttatgtgttctaccagaccagggatacatgcatctctctatggaatgggaagtgaaagcccaatgaagacagattgttgtacctactaactgttacgttacagcagcaactgattttattaatttagtaatttttataataattatcttaaaaaaatatttagcaactgattttgtcaatttagagaatcttgaataagtctctagctaaaagtcattttttcttgtagtgtgtttataaatatcattgaaaaaaagacatgtgttgtcttcattaatttattgcgtgtgtatccttgaacgaagtttacaacataaatttaatctttcaaaaacatttgtaaattcattttatcatcaagatggtctgaattaaggctactatttcacgacatccagtaaccaaaattatctattgggtaatgatatatacttaaacacttcagtattttacacatataagtaacaccttttatttatttctatctttattttttttacatcaaatacctattagttatatatcaatcacctttttcaattttatttttctctctgtgttggtgtatataagcatatgatatgggtatcaaaaaaacatttcccttatattaaaactaaaaataaagagtgattaaggagtgtgacttatatcttcttaattaattttcaaccggccttgcaaactttggccacatatggtcatctttatttcaatggacgtaattaacaagcctgctacaacttttaccttcccattaccttttccttaaatatttctgtcacataggctcataactaaagcataatttcatttaccttcagaactcaatgggtggtgatgatcaaatgaa

SEQ ID NO: 4459 - DNA, 1032 bp, Glycine max
ttctatgctcttgtgatttttctctaaaagttgccctatgatgggtccttatgctagaattttatcttttgcatcttgtttttcatatatttagttatattatattttccatcagctttgttcttgaaacttgtgtatatcaagaattgttcaaatcaataactttaggcaaaaaaaatatatttaaaaatttaattaaataaacattttatgatttgtggttttgaaatttacatcttaataaaggtttaattttttgggttacctcatcagtttgtattttcttttttcccccatgctttccaactgaaaatcactacattgaactggacatttaccaaatataaattagaaaacaacccaataaaaacacaagtcagatataaaaagattacttatttaataagctctttcaattttcctttactcagtagtatggctttaatttttcagtaatgcagtattataatttattgagtcagttcctagttttactgtgtcctgtatataatatgaaggtgcctctcatatcatagagcgtagaaacttggggtttcaactccacgcgctaaagaaaatgggcccctctccctcttctcccaaaggctgcctagcacactataacacagttcataaagtcagatttaaaattcacttttgcaatggttattcaaaagaaaatgtcaatttgcgaagaaggttgcctgttcgctgtgcagtgaaactatggaacatgacattttaggtatccatagagatgaaaattatattgtcctagaaggatggtcacttgtgagttctgtgagcttcctttgctggcaattgacctggctgagcatcaggtagtgtttattataaaggacttcttgaattaagaaggttatattaatcagtgtgctctgttactaatttcagtttgatttttaaaaatatgcgggaatcgaacagaactttgtcacctttgtaacaaatatgttagactgcgcgaactatacaaccatgaagatagttgcaatagaattcaagacaatt

SEQ ID NO: 4460 - DNA, 1159 bp, Glycine max
aaggtcctccccttgtggtgggagtcactttcatgggttaagtcagtgggtgctttccccaaagaacccaaagaccattttatgcagcataccgtaccgagcgctacacgatcaaaggatattagatggagctgctggtgggtagccctcacaaggaccatatggcaacacagaaacaagttggtatttgataatcaaatttttaatgcaaccaagctgatggatgaagcacttcttcttttatggtcttggcttaaagcaatggaaaaagattttgatacacatttcaatcagtggtcctctaatttggcagatgcctttatgtaattagatagggaatgtactggctgagccctcttccaagaggtgcagcacacatgtacttaagtcaggggttgtagctggtacttaattcatcttgtgtaccagctatgttcaaaatttatctgtaatctcagtacctctggtactatttcatctatctaatacatatctatttttgctgagcaaaaaaaaaaatcattggtggacaaaactacttttttgatctcttttaaggattttctttctcatttctgttttctgttcttgtttccgtactcaattagttccgttcatccttacccaatgtgactgtgatagtgagttgggagagcaacccaactaatgatggcaatgcataatttaaagcctttggcacaccgacttgagtttttttacaacaatctaaagaaatcttactcatttatttatgttatgtcctaagattttggtttttattaagagtcaaaggaagtgaaagaaactagatagattgataggtaaccaatggttagttagttagggtctgatttaaaatacttaggtataacattaataagcgaactagattgatattcacgtgattggccgcactactattgttaaaaatggtaatgaaatgcttaagaaaacaggagtaaaagaaaaacatttttacttaagaagctgttaaggcattttaagtttgtcgcaaactgatatacctggaacttattccgtattccttctcatggcttgtaaaacttgcaagtatttaagttattcttagcatggctattttacctcttttctcatccctgctaaggaatttgtatgttactttttatttgagcagttg

SEQ ID NO: 4461 - DNA, 919 bp, Glycine max
agcttgcatgctctgtagaagaacatctacgacacaatacatgacccaaggaactatagttatatcaacctctgaactcagacaaacccgacaaacccatgctgcttttgctgtatcagcctcttttgttgccttttcaaccctttcctgtacaatgtataatggtgatgtcattccaaacttatcataaagattaactctaccagatatatgcattacaaagcatcaaggaagctacttcaatcattactcgtttctacactttaaaactatccctaaagccttaaacaactgatatgcaataccaaacttatgcaatttggctagtggatatccaaattgccaattagaaacctatttttaagatatctgaaactctgaatttgaaatgcagaccaaaacttcaaattttccatgtttgatgtgtggtaactaacaacgggcttgtatatgcatgctcaaacaaactataaacaggttttcaaatgattgggaaattagaatgcccacatgcaaaattcctattcagaaagaaaaatattaacactttggtttacagggtagaaaacagaaacagaagagcggtgtaaaacttcaattattccaggaatatcaattgatttaacgcatggaattaaaagttgaaacatccatacagataacagattacaagacaacggaagagccaatacctaaagagtaacatgtgtccgtactcccctattcataacagtactacacaatgctaagaaaccatagtactaaaaattaaaatcaccaacctgttccaacacaagagctgcctgagactctttcagattttcttgcaaatttattgttctttgaaatagagcctgcttttccacgtccattttgatcccagcagcagagagtatttcattgacagcctgcaccagtt

SEQ ID NO: 4462 - DNA, 965 bp, Glycine max
gtggtgattttttagtcaacaacggagctggaggccaaccgcgactgactccgtaatttgaagtaccctgctgccacggaaaatcatacaaaaacagtaaatacatcgtttatgctctgtttttttttttttttttatctaaaaaaatgttatgtttcttttattcgtatgaattaaaaaagaaaaatgatatgcatataacaatttgtatgataattcaagggataatttttttaactaacgagtatgatttactccctttattcgttttaataagatccttccaactaaaattatcaataatttatattattttctcaaaattcaccttaatatttttttaaactaatcatctctcttttttcacttaattgtttttgacttaattatcactcatatgatctaatactgataagcaagaaaaagagttaatctcaatcatttctaaagtaaatgatcaatttcatctccacatttcactcactgacaattcgatcattgtactatgaaaatgataagttattctacaattgtgtaaatgtactaaaaattttaatcctatcataagtgatctccatttttgttaatggtgagtgcatacgtgacacaagggacactccttgtcaactaataatattttgaactaaaatgccactgagaaaaaagttctttttcgtaattttgtagtaatactttcttctataataacaaaatgataacatgataagaaaatggtctatgatcataatgtgaatttaaaaacagatatgtatcattaaactgcaaattatattaacgtttttgttatgtatttgtttcgactttacaaaaaagagagtgttatgagtttgaattgaggggtaaaatagtcattttaataaaatttaaaagttggtagagataaatagcaattcttgtaggaccaatagcaactggatccctataaatactcaaccatgaagcgt

SEQ ID NO: 4463 - DNA, 1113 bp, Glycine max
ctctagagtcgacctgcagaaacttacagcaagcccaacagttccaaggccaaaaatagcaacaattgaccctgactccacttttgcagtgttccagacagctccaagtcctaaaaagttgggggggaatagatatcacaacttcataataagtgaacttggtattggaaggacacaagaccacacatttcatagcattaggaagggaagaagggaaaaaaggtctgtaaagtaacattttcctttttcacaaagcatgttaattgctaaactatcaaaataaaaagtgcaagatcactgataggccatcttgttatcaaatttaaaataatactaaacaataaccatgatctatcattacatcaaactcaaaagtccaaacacaggattattctaattgaaaaatgggttatagatggaatttgtaaccctgatcagaaacattcgagtctaattcttataagatatatgtctaataatataatctatataggcaaatgcaacatcattgtcgaaacacatttcatgaattcattagattagacacagcatgcacagaaaggataataagacccatcccatataactttcaaaatctcaatagagtttctgaaaaggagaatgcttagtcacttaccagttgaaacaccacatccaagaaggcaaactttctccaagggagctaccgggtcaatcttagctacactaacgtcatgaacaacagtgtattgactaaaagtggatgttcccatgaaatgataaatgggcttcccattaatggagaaccggctctttccatcattgagcatgaccccaactccagtggcggaacgaaccttgccacagaggtttgtcttccccgatttgcaagtcttgcactccccacactcagcctggtaacagggaatgacatgatccccaggctgaacattagtaacaccttctccaacactctccacaatcctgcaccaaaaaacgcgtaatccctaaaacccctatatcatcaacaacaatcaagtaatgctcatatcatatatcacatgtcacaattgcatcttaaaaatgtactattcaatattcatatactatacataccctgcaggcatgcaagct

SEQ ID NO: 4464 - DNA, 1204 bp, Glycine max
atgacaaaattaaagcattatctctagctactagagcagaaagaataagggctacctatatagctaagctcgtgtcttttactcaatataattgcactttgaatatatatatatatagagagagagagagagaggttgatggttaagagagaaaaaaatgcagtaggtttcatcttttctactgataaaattaacattttgaatatataaaagtaagattttaaatataaactattgaatgaaaaaaatgtaattaaaatgaaagattcttgataaaaagatggtcgatcaaacatatttttttaaaaaaatcatcaataaattaaatcaatgaatattttatacctatacataaaaaaaattaagtaaatatcataatatagaagtgttagagttggtgtcccgaattcttgatctagcatgaaagttcattgtgcaacccacttgataaagaaataatttgagagaaaatttggggtcaattgtagggcgggagaggtatcaacctttattatcaactcatggactagggttacttatatacataaatatattgtgtttcggggagtttgcatcattagatgcatttcttattttctcttgcaccattctttgatatggtgaattaattcccaggtccttcctcataactttttgtaatttgatttttttacataaatcttggtgtattctttttttaaattattattagcaattattttctaacaataggtaagttattcccttcttatgtgtacataaaaatgtatctatctgatattcaccaaatgtatctaatgataaaactacttttatataagaatttaactcctcttattgtctctttcacgatatatgcaacaaagaaaaaagaagtctaactcacataaatgttataagttgctgctttctctctatacatatactacatactagtatatattttaaaatgtacgtcttactttcttacttttatgttactttcgtaggacccaaacttgcgtttccatcggggctaattgactatgaattatatattcagtaaaattaatgtgtgttaggtggagcaaaaaggaggcatatttttatagagtacgtaaatgttgggaatgaagctagctcttaattgcctagaaagtgttagtaatagtatgaattggagtccaacggagtcccagcataaaggaagcagccatgaaataat

SEQ ID NO: 4465 - DNA, 1095 bp, Glycine max
aaaagttagtagaatttcgccttaggtggtttgggaatgcatgaagaagacctaaagaagcctcgataagaagagcagatcatatggagggcaatctatttccttgtatctctgtattgtatagagaggtgcagtattcaactcactctctcaagttagtagttggcatactgtgtcagtttgtaaagttagttattgacagttgtcataactaactaactgtttcctaactatctaacttcataactctataaatagagtgttgtaactcaggattcattaacctccataatattttctcattccatttatcttctttcttttctcctttttctatgatctaaacagagttctaatgtgatctattagttttctattatggtatctagagcttggtgagatcttcaatggctgcgaacagcaccacattcctttccgcttcttctttttcccaattccatatcacataaacttgatgattcaagctttcttctatgtcgtcaacaatttgagcctgctatcaaaccacacaaacttaacgattcgttgctaatcctcagattccacttcgatttctctctgaagaagatcaagaagttggacgtgaaaatccagcttacgaagcatgggaaaagcaagatcaggtgttattagcctgacacaaatcaaggcacttgctgatgctcttgcttcagtaggaagccctataatgattcaagagcacattgattcaattgttgaaggtctttctccagattatcacccgataatcgagataatttagagtaagtttgaaaccgttccaatcacgcaagttaaagcacttcttctagctcatgagtcttgtctgaataacttcaacgattaattacactcatgcacaacacagagcgaattcgcattcctaaaattacactttgccaaaaaagtcaagttctcaatcggatcctgaaagttttttctggttttcgcggtggttctgcgtgcggtagctataataggggtggcagcagcggcggtagtggtggccattgtcacactggtgcaggtcaatttgcctatttccaatgccaagtctgctttaaatttggtcat

SEQ ID NO: 4466 - DNA, 1126 bp, Glycine max
gattcgccagcttgcatgcctgcagcagcttcaagtattttgtgccttccaacaaaggatcttcgacctaagcaggagaaaattgcacaatagcacaataaacagtacaatatcagccataacaattacaataactcaataagcataacttatcagaataatttcctggaaatatatcaatgaattttcacagaaacatttcacagttgattagactttgataaaccaaataatgaactacatcgattttgttaatacaggcagagtaatgaaactgtaaaaactgtctttggattcaacatggcattttaaccatgaatctattgcacacacatacatgtactcctcatgcaaaaccaccagaatactctctttcacacacacacatgcatacccaccctgccaaactaccagaatcacattgaaacattgttcaaggatccatatttagaataagtgacatttgttagagatataataaagcctttcataagccttcaccaaacatattttagggaatgctggaacatgacatagtatcagttcttgccacccccattcttcaaattattaaaaaaatctacaaaagttagagtaggcatgggcaatatccatacttacaatccaaagagctctagcatgaggtgtcacgttaaagataaaattgactgtcatgatgagcctccatggctccacataacatcttaaacttttggaagagttggttcttcacaggttatactcacctatactttttgcatactaaaagaaaacaaaagtattgaaatttaacctgcaacaacttttcaccacgtggatccggatcaatgggttttgcctgccgtttcccagactttgatatcccaccagcacttgattcttcaaatttttcttctgcctcctaaggggggggggggggggggggggggaacaatagcatgaatacttttccaataagaatttccccacagaagcaaaagcagtgattattactttcttagctcttgcttctgcctttctctgtttttgcctcattttctttttttgagaaggaagcaacttagacatgtcattatcttcctcggctgttgactttgggggagaatcatgcaatttgatataacat

SEQ ID NO: 4467 - DNA, 1514 bp, Glycine max
ttctctagagtcgacctgcagaaaaagttaaatatgcttagacatgtggcttacacaagcttctttattaagctttatgcatcacttccttgacttggattgttggaatgttgtattcgtgtttgatgctattgcatttacagattaatttttgtttaattcgcccttgaaaacaaacaattcaacttcttatttgatccatttcatatggcagtacttgcttttctctgcatgctttgctttcaaccacaacaatctatacttagtaatttactgcagatctagacccgtttgtgtaaccaatcttccagttttcaacatgttttcaactgctgtactgacttgctttggtgaatttttatccatgactttcttaacttgaacaactgcaataccagagaaccaaacaataaaatgacaaaaattacagtcccgtactactttacagactgcaatataaagaaaaatgaaaaatctctgaatcatttatagtcccaggatcattccagatataataaactactacagcagtagagcactaacaaaaacttaagcagatagaacaaaacaaatatctacttactgtcactgaaatcaaatttcttgctttttttatcaatctcatccagaagaagccttcttcccttttgcagccaatcttccagtttttcctaggatcaacagtatgtaaatgcaagaaatcatttaacatttatgtaggagaaagaaaattagttgaccgcatgacccagagaatagggcaaagtaatagaagtaaaagctgaaatgaatacaaacttccaagatgtataggaacaagagagtgtcaactgtcatgtttagagaagaaaaaagaatcaggaaataaaatagcaacctcggttctattattattgtttgggtatgtatggtctagatttgttttaaaaaaatcttaagccgtaatatttcaatgtatataatataaaaaagagcaaattacagcaacaccctctgaactttaatcaaattacacataacccaacccttttgattttcctacactaaaccctctttaagtctgcaaacattacactaactcccccttatttgtttggaaacactacactgacacccccctgaataccccctcaaatcttacactaacaccctctacaagggaagtgaaagtatggttaaaaaagcagggggtgcatgtgtaattacacaaaacctcatggtgttgttgtaaatttctctaaaaaaataaatattttattaactattatagcagcagtgtggatggaggtagtggtggcagagatacaggttgtggtaaactgtcacatgctctagtggacaatgtgttaggaacccagaaatatattccaatatcagagatgccaaaacatacgggaaatcgatattttcctaagggttcctaagtagaatattttattcaattacaaagacctagacctaaggagaatattttccttgcaaaggttttcactacacaaaggattcacctttct

SEQ ID NO: 4468 - DNA, 1201 bp, Glycine max
aaaaaaaaaatatgctgtcagacaaacctaaggaatccagagagatgctgagttcaaagcagtttacacctaaaaatgcacaaaatacagaaaagtagaatgaagtaatcgatcatggaaactcaccacaatcttcctgaaatgaagtttcggcagggattactgttcgcacctattcacacagaaaattgttacaaagtctcaaactgctgcttagcaaaagtaatataagaaaccacagatgttgtgagatacatgcacactttagcttttctaatatcttctattcctccaaaataatcataggcaattcttgcatatggatcaagcatcaacctgcaagagcatgaagttcgttaacagcataagagctgtacaaactaagtatatgtgaattttaaacaaagcagagcggttatagagaagccaattgcagacatgcaccccccccccccccctctctccttcaaatagagcagtagagaaagagattttcaatcttttaagttgcagggactggtgcacaacccattaattgtaaagtctcggtttaaacaattcatccaacgaagatgatccttcttgccacatccactaggtgcttcaatatgatgagagaattccatacccgccttgcatttagtagtatcaaaacttgaaacctaatcggaatggagataagattatcaatataaatatataaaaaaataaaaagcaatataagaaattcagcacttaatacagataaattcaaacaggcatttcagaggagaaaatttagaccaaaactaaaattctttaaagttaacaggaatatcaaacctcaacaatggtatcatccatgtgaacatggcatacaggaaaacgtttaccaactatctcagaccatgaaaatgttctcgtcacctgcaaagtaaatcaatattcatcatgtaattataagatcttaagagattgagcccaaaatttacgttttcaagagagattccataaagtaactttttatgcaaagctaaatgccaatgtaaacacatttgttgtccttctaactgctatataataaacatgatgtttaatctatagcactgtccagtaaactgtcatttcatttattatttttataagcaaaagaaggcatgctaagcatcactatagtaaaggggatcccaactatgtcagcacccccaatgctagctatcat

SEQ ID NO: 4469 - DNA, 1204 bp, Glycine max
ttgccagcttgctgcctgcagtgtaaatgcaaaagagactattgtcatcatggcatacaaagtcagtacttttaaactaataatatagatacataataagcggtatgatgtaaaagaaagagaaataaagaaaaatgatatcatttcacaaaaaattaatttccccaaagagattcctcacaattttgtcagtggttagacttggataataataaaaatgcgtacctgtaatgcatgttggataaaaaaattaattcccctaaaaaagagtacctcacaattgtcagtggttagacaataaaataaaaaaatgtgtacgtgtaacgcatgttagataaaaaaaaaattaattccctcaaagagatataaaaataattatagagttgatgttttctcatgtttggtagagcatatgcagcaattaagcagaccgaaatggctgagaatgcaattcatgtagtgatgcttccatggtcggcctttggccacttaataccatttttcaaactttccatagccttagccaaagctggtgttcatgtctcctttatatccactcccaaaaacattcaaaggcttcccaaaattccttcaaatttagctcatttggttgatttggtgcaatttcctttgccatcattagacaaagagcacttgccagaaggtgctgaggccactgtagacattccatctgaaaaaattgagtacttaaagttggcatatgataaattgcaacatgctgtcaaacaatttgtggccaatcagttgccaaattggataatttgtgattttagtcctcactggatagtagacattgttcatgagtttcaggtaaagttgatcttctataatgttttatctgctcctgcattaacagtttggggaccaccaggtacaaggaaaactcccttgtctccagaaagtttaacagcaccaccagaatgggtgacatttccatcttcagtggcttatcgaatacacgaggcaatagcgctttgtgccggtgccaacccggtaaatgcttctggggtaagtgattttgaaaggcttcacaaggtatttaatgcctctgaagctgtaatttttcgtagctgctacgagattgaaggagaatatctcaatgcataccagaagctagttgggaagcctgtgattcctataggtttatgcctgcaggtcgacctacaggagcccgggttcgacc

SEQ ID NO: 4470 - DNA, 1315 bp, Glycine max
atgtttcgccagcttgctgcctgagggggatttggtgcaccaacatggtgatgatttcagggaattggggtcggaactggaaattgaagtcctcagaagaatttcaaccacacttgctgccaatgattgcctagacatatgcattgatatatacgtcaaggtaattaataattaaccctgatcatcacaaataatcatcactctattggcatattgtgtgttaaaaagtgattaaaaaaatgtgatatgaactaatcataaagtaagattagattggttcgtttcatatttaaaaacatctcctacatagaagtatagcaacttgcatcaaaacaatgtagtatttaacgtttttcatcaatattatattcatacagcaaaattatagaataactaataatcgaggttggtaaaatatgtttttaatctttatattaattttcattaaattttatttgcagcttgcgaactttcgtatggtgtaattcaattcctaaattttatataaataaaaaagtatttttaatcccttctcatataagctaaaaaaaatacagaagcttaaggactaaaacaagttgtgtataaaaaaataattctgttatgtgatggaacaggcaagatatagaagggctgcaaaggcactaatgaagctaaacccagattacctgagaacatacaccccagaaggaatcgaagaaatggagtgggaaaccttagagacagccacaaccctttggatccaacacttggaagtggcagtaaagaaagtcctccttgcagaaaagaaactctgcgagagagtcttgggagatttcatggagggactaatctggccagaatgcttcatcaagatttccgacaagatcatggccgtattctttcgcttcggcgaaggcgtggcccggagcagcaaagagccccagaagcttttcaaactcttagacatgttcgagtccttggagaaactcaagcccgagatgtcacaaatattcgaaggcgaacctggcttagacatatgcacaaggttccgcgagttggaaaaactcatcatcgatgcttcgagcaaagttttatgggaattcggcctccaaatcgaaggcagcatcgacggtcttccacctgctcaagacggttctgttccaaaacttgtgagatacgctatcaactatctcaagtacctcaccacggttaattacagaacatcaatggttaaggttctccgaacacaacaaacatgggaagatagaagtatcaatgacatgtcttcggacgagggtttgttaaagcatgcaattagcaatgtcatggaggc

SEQ ID NO: 4471 - DNA, 1011 bp, Glycine max
agtggcacttttggagttgcacaaagaagagtccaaactgagggtggatgaataagatgatgatgatgatgatgatgttaatatcttcttcatgttgaaggattttgtaaacaagctaaagagctaaaggagaatagaatgatacaaaaaaaaaaaaaaagtgaaatggggtttctttttggattcgctgactcttcaaagagaaaggcaatggttatgggatggtagcaatggaaagtgggatttgaattttgttatatgagagagaagggtggcgggatttgcatttgaatgtgagaactgagaaggagcaagttagagtggggttattactactatgcttttggccattgactagtcagttcatgcttcatggctaaatttgtccttttatttcctttcttggtgcaaacagaaagccctctgttcgggcgggttgaggtggcactttttactatcttctttgaagttcaaacactaggaaaggaaaagaatgacacattgatcaatgagtgtggccattttgtttttggtgaaatcgtcttatatcctaattttgagtcaaaaaaatactctttggaagtatgaaattcatgttttttctacaaacatttatccatataagattgaatctctaactatatatttaagagttataattatttctcaatcatactacactaatagtataatttacctaaaaaactgatatttttctacaaatatttatccatacaagattgaatctctaataatatatttaagaaacatgattatttgttaatgataccacactatattgatatcaatgatatgagtgtgcctttaatatgctcttagcattttgattttgatgatagaagctgaggttcagattgagtggtctaagcatggcagtgataacatagtttgtagttttgtgtggagggtgaaacattgacagaatgtggttgtttttttgaggtcagagtagcgggtaatgtcagtgaactgaccaaattcttttgcgtt

SEQ ID NO: 4472 - DNA, 1004 bp, Glycine max
aacccaaaagaatttggtcaggtcactgacattaccagctactctgacctgaaaaaaacaaacacattctgtcaatgtttcaccctccacacaaaattacaaactatgttatcactgccaagcttagatcactcaatctgaccctcagcttctatcatcaaaatcaaaatgctaagaccatattaaaggtcacactcatatgaatatagtttggtatgatttacaaataattatgtaccttaaatatatagttagagattcaatcttgcatggacaaatatttgttgaaaaatatcaattttttaaataaatttctgtattagtgtagtatgattgacaattaattatgtcccttaaatatatagttagagattcgagttgtaggaataaatatttgtagaaaaatattaattcttagatgaatttcagcttcgaaaagattaattttttactctaggagatgataatgtttcaaaaaaaaaaaatggccacaatcattgatcaatttgtcattcttttcctttcctagcgtttgaacttcaaagaagatagtaaaagtgccacctcaacgcgccccaagagagggcttctgtttgcaccaagcaaggaaataaaaggacaaatttagctatgaagcatgaactgactagtcaatgggcaaaagcaaagtagtaaaaaccccactctaacttgctccttctcacacacattcaaatgcaaatcccgccacccttctctttcatataacaaaattcaaatcctacttttgttgctcccatcccataaccattgcctttctctttggagagtcagtgaatccaaaaagaaaccccatttcactttttttttttttatcattcttctctttagctcttttacttgtttactaaaccattcaattcaacatgaagctcttgacatcatcatcatcatcttattcatcaaccccatcatcttcatcctccctcagtttggacccatctttgtgcaactccaaaagtgtc

SEQ ID NO: 4473 - DNA, 1206 bp, Glycine max
aaaggaactttgagacaaaatggtacttttaggagactgcatggagtgtaatcttctcagaagttcctacaaatacaatggcatacaaatacttagcaaatgaatgtggaaagcacactgccaaaggacaaacaaggcaatacttaacaaaagactaaaggaggattttttttttaattttcagttaaggaccagatagagtggtaattatgttgtacagactagtgagtgtgctattgaatggtaaacatatttagagtgattagtcacctagagaccaagttttaccaacgaaataaccaccatatagacaacaacaaaaaatataacagtaaaattttgttttaaaaaggtccactttgtaaattttccactatatattccttaagttttataatctataaataaattcctcctttgatgcttattaatgttaatgaaaaccaaaatacttatcactctgataattacatttgacacaaacagcgtgcaatttttcataaaacaagtagaatcataggaaagacagctaactccaaatgtcagcttagactaataaattttaagtacagataaaagataacatctgattccatttccaccaatatagacaacaaagaatgaagtcaactgctttatttcaatgaaaacaacagttaagagaaaggtaagcctgcacaacagcacaagtatgcaagagacattactcacagaagatgaacttgcagaactctcactaacaagctttgggaggtaaggtagataagaaatcatttccaacagaagtaaacaaaatctaagcaaaagatcatataggaagaaaaaaaatgaactacaggatcagaatcagtaatcatacccagagtagcatgcttcaagttttagactttacaagccccccaaaaattcttagttaacctttaatctattcatgaacacatgcacaaacacaacacatatgtcgcgatcaattttgaggatgtacacaacgataagttaatgctcaggccattgaaccgcatcacccagacaccagcttcagttatacatacagagagattcaattgatccactgttgacacggtcatgtcaactggtggattgttcattccaataaatcaaaaccacacaactttgtttcccatttctaggtcaaatgcctaattacatgcaaagtgtatctgcaggcatgccaagcttggcgaa

SEQ ID NO: 4474 - DNA, 1135 bp, Glycine max
ttgcatgcctgcagtcagatagaaagatattataagcatgcttgtatatgattgatgaatgtaatgtgagatgaaataatgctggtaaaaatattatgaccgtattgttcaaggatgaactgaactcaccaatttttcccattagactgcaatcattccctgccttaaaattcttgggagtcccacaaatgcttgagctgaaaatagcaccagcaaaaagccccaaaaggccataaagactctttccttttttcttctttggaacctctcagtattgaaaaagatagaaaagaagagcacagctcaattctccttcccaaaggatccgagaataatcctttatataagatcctcaaagtctcaaactttgttcagcaagcctcagaatggtggttgattattccaagttcaaaaaaataataataggccaggttgttcaattattatacaagtcaacttaatgtattatggttcttgctaaaccgttttttattgtaaagaaatgcaaatttgatcatatgtacctgttcttgcggggcaagcctctcctacaatatattttgctcaacaagaaaatgaacgcgtagaatagaatcacagattgttggtaatggtgggatcggtcaacatcttgtttatggattttatttgggccacaatcaatcaggcaaccagcagcaccaaactcagttacaatattgtcacaaaaaagaaaataagtatgtagtgttcttgaataaattgtgaattagtatttttttttctgtccaaaagtgaatttaactgtatataaaagatataaattttaaatgtaaaccattacttatatatttgtttttttttgtttggttgtgatttgagtcactcagtttcttgaaatcaattcactgaaaaacaaccttttccgcaataaagaaacatactaatttctcttaaatagatcaaatatacagaaccttagagctgaatccagttgttatatcgtggttctaaaatatgtaagtcaatctcaatacacacattaggactttgtcatttgtgttatttgatcaaattaatcactggttggttggcattagactcagacacttatctttaagcgatgaagtgagggatagttcatattgtcaaagtt

SEQ ID NO: 4475 - DNA, 1172 bp, Glycine max
ttacttttattgaagctttagaccagctcatgccgggatttgatcctgaaattagcaagttggctcagagggttctcataaatccccggaatattgactatcatactggagtttttgcatccaaggtaactacatctggtgatttcttatataaatttttgttgggtagctactttgaattttcagtcatcatgttttctatatagatcactcctgcaagagatggaaaacctgtcacaattgagctcattgatgcaaagaccaaggaacaaaaggacagtttagaggtgccttaatttttttcctgaaggcttttaatttatcactttgttataactgttaaaaattctcccacagaaatactaattggtaaaggttgattagagaacatgcaacctgggagcaaactcatacagaattagtctgactatttagtagttaccttttgtcatacgcatagtaggacactcttaatacaacatgctctcatggtactagagaccttgtaatgaactcagatcacattttcaaaattcaagtggttaatatactccccttcaatatagcatatagagaaccatacaacagtacaggtacatatagctctgcgcaggcagacaattcagtgactgatgcataactggggcagaagtggttaatgttaatgttcaaggatttcgccttccagcttttctaaatttacatttgaatgtgcttatctttaggagctagaggcttctgtatctccattgaatttagtagtgcaagctgaaatccttgaacatttgtagtgttacggataggatttacatgtgcagtaccattgcaagttgtaactatctggaaaatgtcaattatagatcacatttttcattttacatatctatccattcatccatctacttatctgtccatccatttatgtacataactatatatatgtatgtacacacacacgcatgcgtgatgcctttatctgcatttttaattactgaatttttacaagctgctgcttctgttatgctataggtggatgctgcactaatagcaacaggaagggctccatttacacaaggtcttggattggagaatgtatgtctttctagctgaaatgtctttaggataaaatgttttcctcaaaggaagtgattggatatttttctttacatgtt

SEQ ID NO: 4476 - DNA, 1158 bp, Glycine max
agactcgcatgctctgcgagctgtccttatattattaaagtcccccaatacgcaccaacctcagggttttgatttttcagttgtttaaccctctcccacagcatccttttatcttgaagactacaaggcgaatagatattaattatatgccttggttgtgtctcctgacaccacttgcctgtcaacattataaaacctgctcctgaagtcctgctttctactttgaacgatttctcattccaaatacaaagaatgcctccatctgcattagaagaaggatatgactcccaactgaatcctgaatccccccataacacttgacacattgatttctcaacaatctccttttttgtttcttgtatacacaacatgtctatgtgatgctccttgaccagccttcgaattcctggccatttaacccccctccctaaccctcttacattatatgatagaataatcattgggcctgcctcgtgatccccaatctgtttgcctcattgccatctctttcttccatttccactatctgctgaatataatccctttgtgaagttccagtggtcatccccagctccgtgatcatactccaaatcttctctgcatcttgattgttagctgttttttgattttctccatctgaccttgactgtgttgtgagctgatgttgctgcgataatttgcttaaatgattccctttatttgtttcttccttttgctgctgacttataattgaaggagtttctgctgtgtttgtgtcatcccgcgaaaagagagcctcacatttctgggctaatttctttttgcccccaccttttcgggaatacaccagccaggagttatttgggcatggtgtgtggccttttgggcttgctttttggggagcaaatgtttttgggggggtgtaaatatcacagcccaagtccactaggctttccacctccttgtcacgtgccttttgtctcccatatttaaaactgccgagctcttcaacgttcatctttgcctccatttttccactttcgtgattgctctctctgatttcatcagaagcacatctcccataataaaaaatttccccaatttggtgcatggcggattttgttgtcgccccttcccaacaacgttgcatctgaacctctggaggtcgactctagagga

SEQ ID NO: 4477 - DNA, 975 bp, Glycine max
tcatgtcgtcgttattactcaaagtccaaacttcgtgacacgtattaagaagtaagtatttacatttaatattctatttgtttttcctgctcacttttgatggaagataaactgtagttaactggtgatagaaaccaataaatgtattatatatgaatgcttaattcaggacaaaacttactataagtgttgtttgtattattattattattatttttttatcaaaattggaattccatctaaataattcatgtaataaaagattttgtagattattaaaaaaactaattttgaatggggaacaatacaagaaacagtaacacctaattaactattaagttttctcctagctaattctatttccataactgtatggtttcgtgtttctttgggagatatatatttttttccaagtcatattatatatataatataaaataagacacaaattgttgggttggtacaagatccttgattagtaacagctatgtggccgttttttgccttttgcttttgtagtcaaggttgaaagaaaggtgtaatactagtaggatagatgagaagagagagaggctggaatttgagctttagtcagaaaaaaaaaaaaaccgggttttctttctttctatcctgtttctttgcttctcttttttcctctctatctctcataaaccgcctacatacatgcacttcttaaattagcaaaaacttaaaggtactatatgtgtgtttgaagcagctgctagccaccttttcctttattattattattttttttctcactgccttcagttaaagtagcaagctagataggaaattctggtgttttccatggttaaagcaggtttatagctcaatcctattgtaactgtttcctctttccttcttctactcttcttcatcttatcctttccgaatattttccttgttttcctgcatattctcatcttgttctgcaggcatgcaaggttggcg

SEQ ID NO: 4478 - DNA, 872 bp, Glycine max
ctgtgcgttgggccggcgctctttctgctgcgggtggtccttttacttgagtcgggagggaattcccggctcggattaaaaaatttgggggattgggctggtatgagctttggatattttggggtgctttcatccatgttggggcggtggtgaccgcgtgggcgtctccttcctttttcctcgcgcccactactggggctcttctgttgttgttgggggccatattggaagcatattcgaacttgccttttcctagtccggattgaatcctttctccggcgaagacgagatctgcaaagttagctggcatgtagcctatcagcttttcatagtagaacgtgggtaatgtatctaccataattgtgatcatctccctctccgtcatgggcggtacgacttgggctgcgagatctctccatctttgggcatattccttaatggactcatgctctcgtttagtcataccctgaagctggttccgatcgggagccatgtccgtattgtactggtactgcctaatgaaggcagttgccaagtccttcaatgatcggatctgggaagcttccagattggtataccatgctacagctgccccggccaagctgtcttgaaagaaatggaccaacaacttttcgtccacagaatacgcccccatcttccggcaatacatccgaagatgcccctttggacatgttgtccctttgtacttatcaaagtctggtactttgaacttgggagggatgatgatgttgggcacgagacataaatccgctaaatccgagaatgggtaattgccgaggccctcgactgctcttaacctctcttcagcgcctcaatctttccctaatcttctgtgaagggaacagattctt

SEQ ID NO: 4479 - DNA, 1115 bp, Glycine max
atattgttcgcttgccaagatttgagatggttatggccaaatctgaggcaaatagtaagcctgttttagcagctgaagatgccttcattgtcaccgtgtatgtattggctatttacttcatcaaacttaggcctttataattaatatagcttcctatttaaagttttatatctttaacaatcaaccacagttatggtaggatatactgcttgcaagttgatagagttgctatgctgcttcattcttataggctatatcgtgatgcagtgattcagcaggttggtcttgctcaaattctgaatggttttctatttcaattcactccaaatttcttgtttaaaataacaagcctgaaaacttttctaaacaaatgcccactttctgtgaagaatatgttcccctctattttgctttggtgattatttaacatcaattatggtatatgatcttaaacagataaaacttataaagaaaaagtattttttgaagcatttttaattaaatgtaggtacaaatcagtgctagttcattgtatggttttattatagacaaacaatctgtaataactcaatagatatcaagaattaaatcattatactttaagaaaatcacatattgggaacagtaagattaattatgtttatcttaatactatttgcagggctctttaccaatttattccaacagtattgccgtgagtgtggtcgacaatgtacttcttattcatcaagttgatgcaaaggttgttatactttatgatctgtttgcagattctcgagcaccaatatctgcaccgcttcctttgctattaaggggtttccccagatccagcactttatctcaatctagtggtagagaaagtgagagcacagacggtaatgttttgagcaatcatgaagcagttacatatgccaatacatggacttttctagtgcctgacctcgtatgtgacgtggccaataagttattgtggaagttccatttagacttagaggtcagttatttgttcatttatgtgccaatactgaacataggtgccttctctttcatgaataatcctatcttgcaggcaatttctgctagtagctcagaggtcccatcagtattagagttcc

SEQ ID NO: 4480 - DNA, 1167 bp, Glycine max
tcgacctgcagaagtaattcctctagtcaatctctgttatgaactgaagaacaactcaatgattcctagcattcgaggtctaggaccctcctaagaagaaatgaagatctgttatgaactgaagaacaactcaatgattcctagcattcgaggtctaggaccctcctaagaagaaatgaagatgagaaaggaattctattattttctctgcttgctttctattacatgattcattcatatatatatatatatataagtaccaaatgctaaaagctgttatccgattccagcacaatctaacaagcaacactaacagaatttggcaaataacagaaaaagcataaatggcagacagcatatgcttatggagccaatgaattcctgccaactcagcactgttgtcggaattggttatgcaaaatcatttagagatattgtggcttggttatcttcctcttgggcctttggtttgtgcctgcttgctgtgtatctggttgctgctgcttcattccattcataacattccttggcccatcaaaaacaccttgtcctcaaggtgttgggacttcaaaccatgacttccaaaagtaataccaggatctcaaggtctgtcccgacgaaactcacttagtttagcagctgcccatagtgcaaaagcagttggttggcgcttgcatgcgaccatggcagacccataggactcacctaccatctcaaatagtgccatgtctctatgttccaaaagattgtcatgcggagccgctgcacgaccataatgaacaacaacacttaagaggttgtcgagggaaacaacggcacaagtgtggttgagctggttgaagacggaggacggcacgtggggcacgtggtgcttgctgttggcagcaaggtggggagcaggcatgggtgagtggctttgttgcatcggcacggggcatggaggcgcagtcagcctggaaagcgaagccggtaatggtgactgatgagggacttggttgcatgggtgtgaagcatggtggcggagtcggtatggaaagcggaggcagcagtggtgactgcacggaggaagatgggtagtggtggctggttatcgggataggcagttttagaagaatggatcaagtttggattcaatggaagcttgggtctcggcgaaacgaagttaac

SEQ ID NO: 4481 - DNA, 931 bp, Glycine max
aatgaatatgtagagtgatggaggttcactagattgccaacgacctgcatttttaagaaaggaaatggccaaaacattattattttatcatgatcataatttacaaagcaatattgcatcaccaatatatgtctcaagaataatttgataaattgttatccataagtttctcatatggtaactagaaaaacattgttacgtagaaagttatggtaacaccatttttcctctgagaactaactaaccttcattgtcatcttcgaaatcaaaatcaagggtgttcctgacagatctgaaaaatgaagtcataggtccagcagggacatcatctaaggaacctatggtaatgccatcaatctggcagcaaaatataatatcttcattcagaatcaatgccaatcaaatgagagttaatggcataaatacagaattttccaatggtgtgatcttttgctggaacaattttagaaaaatgttacaagttaaatgtgaattggttaattagacagatgggaaataaattcataattttattactgaatctagagctgctttgaacaattgacaggcccggcgcttttctggtttatcagggaatacctacaaagagacacaaatgtagtaacattttgaaaagagaaaaaaatatatacgtgaaaattttgaaggtaagtaacaggatgtgtcttcttactatgcaagctctggtttccttcttttccttgagctttcgtacaacagccaaggcaagttgaatgttggcatcaatgaactcatctgaagatcccttgaaatatttaggaatttgagaaaattatgtgcaatgtattcagataagcatgtcacacaaaggtcaagtgactatgaattagaacagtttcttaaagcatgaaatcagtgttagcctggcatatagtacagggaattggat

SEQ ID NO: 4482 - DNA, 954 bp, Glycine max
agtcgacctgcaggaaaagttgtaaataaggtaattaaatgctacaatataatgattgacaaaaacattatctgtttaggaacaaatggattatattttatgagacttaaacattgatgaaaaaaatggtcaagcatcaaaagttgttatcagtcaatatctctgtcaataaatatccaggacaagagttgtgagccaacaatgaccattcgttttgtaatctgttattatagcatattattttgccctctctataagagggattaactctttgactgaaaatacagagaaatattttacaagccataaatgcatttatttggcctaaaaaacttaacactttctttttggccatacttgtccgtgaaaaacgaaatttgttggaatttttcagggccaaaactgaaaattaaaaattaaattgaaaaaatgaaaatagcagataaaacgatttgaatgaaagtaaaaatttgtgagggaattagagaatgttgagtagagtgaaaatggatcacgtaccgaataggaatgaggaacaagagagagctccgagaataacgaggatcccttcgccaagaaacccttcaggcttcagccttcaccgagaagccgatcgaggaacaggaaccctagctgtcgtgaacgagagagagtccgcagtgcagttcactgaatattcagctcacaacttttttttcccgaaacgggtcgggtcgaaccaaaccggttacaaaacggagcggtttttaacccgtttcactgaatattcggttcactgaatttgattagtttgatccctaaaattaaagattaaattaatcactagtaataattgtaccaaacttgacagacacacaccctatcagtaagagctagtctacctcggcctagaatacagactaattacccaaaggttccagagaacaaatgaagtactgcaggcatgcaagctgg

SEQ ID NO: 4483 - DNA, 1170 bp, Glycine max
tgatactttaagagtggactaaacaagaaggaaatcagagaaagagactaaccaagataagaggaaaggttcgtccaagctgttgtatacattgataatcaagttgtcattggtcacagcctcaatttgtggccctggaaattgccagtttatcaaaataccctgccattaaaattcacacaccatatatattaatttcattaagaaaaactaagattatgaagataagaaaatcaaaacaagactaaaaaaaagagtacctgttgtttaacaccaagtggataaatgtctccatatgtgacattccaagtgtagaatctataagggtcctcccctctaacacatgccaccaacaacaccaaaaataagacacaacaaactcttacggagcaacccatttcttaattcttggtttctcctctcccaaaccaaaaatgcagaaatgggaaaatgacaatttttgtttctacttagaaccaaccaagttcaatatttttttaacacaacaccacccctcttttcctttgtgcaaaggggtcaatgcctaccctttgctttcttttttttttttcttttgctttagaaactctgcctaggacaactgatataaagggagataatgtcggtagagagagaaaccaaaggattctttaacagaagcaatggatcattaagggaaccacttcttgcatttgcatgtggatgtgagagatagtagccagtgacataattgagctgtacccaacaatgcagtacctttataaagagtgccagcaaccccttcaggccacgtcccttcaaattgaccatagctaagtcatttatgttaaaatgtttgtttcatgttaaaaaaactttcccagaattaaaaaattcaaagttaccagacaaaattatagaactcctactatggaatgacatttacttactttggtatccaaaaagaacaataatgcattaccatagaagacaattttaaactcaaaccaaattcacggtttaactttaattacttttataatctcaagttactttcttaattaattaagaaatgtgaagaaaaacttgtcagggatgaatgtgtctttttgttctttgttgttttttgtcttgaggagatgactatgtaactgatatgatccagaaacagtgcattagggtctactttgt

SEQ ID NO: 4484 - DNA, 927 bp, Glycine max
acttttgtcactgctgatgaagcttatcattgattgttaaaaaaacaagaatggagtattatttgtcaacatttaatcaagcaggaaaaacatattaactagttaacttattttcatttgggatatgataatttacatagatataatacaaaaataatttcaccgggcacaagaggagagaaagttacaagttattataattataaatgaagggtgcatatgataaactacaattttttttaggtaatacattagctatatttttatgtaataacaaattcatcacacccacacccaaaaatctagtgaaaagccgaaacaagtggacaacatttgaagtacatatgctaaaaatgcgaaacagttgtgtctgcatacttcacttttgaacacacccccccccccccccaaaaaaaaaaaaaacacatacacacacacaaacaaccctcccttgtataagctgaaagttagaaatccaatatcattgtctttagtaattacaaccccgactcactacgcatcccaactcagacatgggcctgtccatatgggttatattttcagcccacatcccaactcagctacgcaattatcaaacaccggtttaccaattacaaccccgagtgctagcatcccaagttttagaatcaatcaaacaaacctcagtaccaagaaccctatgccttgacaaaccctaacgttgatttaaatcgtttgttcgcacttcaatctccaagtcataaatacactcttctctccccattcactcgcattggcttttggtagttgaagtctttcattgttgtcaaattcagatcaggttttcctttttccctctctttttatcttatcgattttggttcatgccatgcctctgtaactttgtttgtttgtttgtttgtttgtttgtttctttcttcgtgtaat

SEQ ID NO: 4485 - DNA, 1054 bp, Glycine max
atcttaggatcagcaccatcctttgcaacacagtaagtttgattggtggtgtcatttgccaacactcctcctgattctgtcaagtgcaaaacataaacaggtttaccatttgcatcaaacaaaccccagttcttctctgacaatggccctgcctttgcatcctcattgtagagctcatagatgtaagtactaacaccaattccggggtgtttcggagtcccggttatgttaagcacatgcttgatcaaattgctgttgtaagtgtttgcattttccactgttgcatcaggctcattagagtcaccttttgagggccagcctgtttctgtcaccaccacacgaatgttagtgtaatttagaaaagccatggcaacgtatgcagcatcaaccgcagcatcaaacacattggagtagtggagaagggaattggaatcaatggcttctttgtttggagggaggggtttgaagagtgcatagtccaatggaatcacaccattcgactgcatgtagtcatagtaagggtagatgttgagcatgagataagagccagtggtttgcaagaaatcaagcattggaaccaagactggattcagtgagcggttgaagaaggcttgtgaaggtggaaatgaatcaaggatcatggaagaggaaaggggtgttgagactttgatttggtgatcaagattggatgccacgagggctgagtgaatgaacttaagggcactgacaagcacttttgctgcataggggagggtagttaagacatcagaaccaacacaaatagtagttatgttagtggcagggtaatgtgctatcacattatgggaaacccatttcgcagctgtggtatttgattgaccaattgcaaggatctcttgattagggacagacacagcaacttgaattcttgtgtttgcaagagcaatgagcatagcttggtcggcatcatacagcctaacatgtcgaatttgctgggctttaagtagtgctactacttgagtggggtgaggcatgtctgagagatctctaccaatattcacccctataaaaggtt

SEQ ID NO: 4486 - DNA, 1179 bp, Glycine max
ttgcatgcctgcagtatataaaggctgcatgcataatgaataaaccatgcaaaagcttattttcataattccatttctcttttaggaggagccttgtctcgaactaaggcacattatcccctctactcataacaattggtccgacctgtcatccatgactgtcttccatggctgcctctacccctactccggctatgccataacacaccaccctctgtaggagtcatcccttccgtctcagttcccaccttctccttatatacatccagctcaatcccttgggattgattttgagagtactcggatccgcttactagccttgtgcgatacccggatgccatggtttccttcttcggtgcagccaccactgccgccgctagctattgattttgcgagtacccaacaccgtatgttcagcttgtttagtaccaccactctgcaaaccgtgccaccttccatggatcctataacgccaacaacaacaacacccacatcagctccgtcctcttccgcacaaccaccacctacagcagcaccaacatcagctccatcctcctccgcacaaccaccacctatagcagcacccacgtcaattccgcctcccttggctgtttcccatcatcccaaactcaaaacagtcgcacccatggctccgctgccgcttccccactttcatacgaccaaccatcacttccagctcagtcatccgttgcccctatcactccgcactgcccactgtctttaccgccacaaccattgccgcgaaatcccttatggcaatgacaccatcttgctcagcgatgatgccatcaagcatcagattcatctgcacttggtttggattcttttcgtcgtcaagacttggatttgctctatctgtcatcggcgacaacgtctgccgccacacccgccatcacatccaccgaagccaccgcctcaaccacaaccatggctggcataggctgaacttctgttttactcaagttctttttttttctgcacccaacaccttgaggacaaggtgtttttgatgggctaagaaatgttaggaagaagaaaacgctatagccaagtataataacccacgtgcagattagttacgtgtagttagttaattcagtttcaggttgttagaatttgttaatcctgttcattaggttggttatacgtgtaaagaaa

SEQ ID NO: 4487 - DNA, 1217 bp, Glycine max
aaacttgttgcctcgcataactcactggaagggaaaattcctacaaacttcacaggttgcacctgtctcaaaggcttatacttaaatgggaacaatctgattggcaaagtatcagtcaaagttggctcacttggaaagcttcaacatttgatcgttgctaaaaaccagttgaccaaaggaatcacatcatttatagggaatctttcatccctaattcatctctctggctgttaagaactttgaaggagaccttcctcaagaaatatgtcatctcaaaagcttgacaaagatagcattggatgtcaacgtattgactggaacatttccttcttgtctttataatacgtcatctcttactgtaatctcagccgctgcaaatcaatttaatggccctctttcacccaacatgttccacaccctccctaatctccaagaaatttatattgctgacaatcaagtctcaggtccaatcccaccttccatcacaaatgcatttatcctttcaagacttgagatcagtataaactatttcacaggacaagttccaagtctaggcaagctacaaaatcttctatatctaactttggagaaaaataatctaggtgacaattcaactgattatttgaagtttttaaaatcattgacaattaggaaaatcccaagtcccacatcggctaaaaatgaagtcaagttagaatatataagtgtggggcaaccctcattccttaagttagcttttggggttgagttaagcctaaactcattaatccaaagggctacccactaatcactattgttgttcacaggagaaatccctacagcaacatagggaacttcagtcaattgtttcaggaaactgtgccaaaaattacaatacttaaatctctcaaaaaaccaccttacaggtgccatacctctagaggcttttaatctttaaatctttcctctctaaaaaacttgttggatttgtcacagaactcgtttagtggtaatataccggaagtaggcaaccttaaaatatcgatttcctagatgtgtccgagaatcaactgtcaggtgacattcctggaactatcagagaatgcagaatgttggagtacctctatatgcaagggaattctttacagggaatcataccatcctctttagcatcactcaaatgtctcaaatgtttagacctgtcacgaaactgcttgtctggatcaattccaactatt

SEQ ID NO: 4488 - DNA, 960 bp, Glycine max
aatattctttccaaaacagagacagaattacaacaattagaatcagaatattcactcaaacaagccaagatttcgagagcttggttctctccctcccaaggtctaaaccacacatcttcaggataaccagaatatgattctgtttttccttcttattctacacatacccataactgcctaattaaaataagttcctaataaactgctcctaataatagtaactgctgtcctattaaaactaactgctaactattcctaataaactgctcctaataatagtaacttctgtcctattaaaactaactgctgctattgacagcacataacaattattcccccccccccccccccccttctcttataaacattctttataagaggtctaacacaaggtttccatagtgaggatagaagtgaaggaatcaaaacaacaagctataagcatgatattttattttccccactgcatcacatacaagactgcatccacgaaataaccagcaggcacatttggcaaggtagcattagttgttagcaaatagcataatatattggtaacattgatcgagacattgggtactaatatcattaatgcttaattccaaaacagtttcacaggaaatatatacagttttttatttatatctgcctttaagaaactaaagggaaacgttttcattgggaaagaaagcattcattatattaaaaatacaaaagtcatttgtttcctttctttttcaataatagccttccacttttgtttttagaaatgatgtttatgtttggaatataaataggacaagcatcataaaaataaatatcagagacaatgttatgcagattaagtaaaaaattcgccaacaaaaaccaaaatgattttctaagctaccttttttgtatgatttgttcttcgatatattcgacacctagcagcagagaatggctcatgtctagtgttct

SEQ ID NO: 4489 - DNA, 1123 bp, Glycine max
gcagcttgctgccttaggttttggtttcctagaggaacaacaacactcatactgctgctgccagcaccactagtggaattcttctgctgaagaacattcatgttgtgcattaaaccaccagaccctttttctccagaattgtcactgataacagtaagagtctggttttgactcacagttggtgcagcattgtgcctagggtgaccaatagtaagagactgattttgagtcacaactggtgcagaaatgttcataggttgaccattagtaagattctgagtctgattctgattcacaactgttgcagcagtgttcatagattggccaagaggcacattaacattactagggtttccacttccaacctgagaagagcttgaggctccaccacctccaaccacttgcatagtgttgttgttgtctttgttcccattattgtatctgcatgtcagctgatgattgttcctcacattcctgtcactgaaaccaaagctgctctcatgataaggacactgagggctatggcaggaataggcgtcatgaggaattgtgataccttgaacttcctttctcttattagcaccatgacctagtgccacaacattgccattgttcactgcaaccatactattattatcgctaataccattaacaacattggcagttattggtggtggattattttgctcccccaggaaacttctaccatcaccattaccaacattgcttggtggtgttggactattctgccccccaaggaaatttctagcaccaccattagaaacattgtatgctggtggtgggttattttgccccccaaggaaatttctagcacttccacttgctagaagcatattattattactatgagcagcaacattgagagttggcggtgggttatgactactttggccaccaagaaagttcctagcaccatgaatctcattgggccttctaataattggttggggtgggaacaaatgagggtgcaatcttctagcaagggtttcttcacgtttcatcacagcactccaaacagaagtctccttagcagtgagcttgtcttgaagagtcctcgagtggcgcacgatgttgtggatcttggtgacgtcaggggagatgt

SEQ ID NO: 4490 - DNA, 970 bp, Glycine max
agcaaccaaaaaaggaaaaataaaataactcggtaacaaattgaagtccctttaattaccctttgcttgttgtttgttttttctgtttgcttttttcagccactacttctaccattacactattacatcatttattttatgttactcctgttgttatgttacaatgcagaataataatattatattattttattattacagagacaatgcatacataaaaacacacaacacattctttcttcctcagttcttgttccatctctttctccttctctctctctctctcacaatctcgagattggtgtgtgtgtgtgttgggggagataaagaccactgttgcccactcaggtttctcttccaagtttggattttgagggaacttacagcatctaatgaaggagagtggaggctctcttggagaagagagcacccccaccaccaacagcagtgaagaagaagaaccaattaactagttcctttccttctttctctcacccattcccatttttaacctaatagtagtgtaggtttaaagaaatatagtgtgttagagtgatggcactttctatgcacaaggactcagccaacaaccagatggactcgagcaagtatgtgaggtacacaccagagcaggttgaggctttggagagggtatatgctgaatgccctaagccgagttccttaagaagacaacaactcatcagagagtgccccatcctctccaacattgaaccgaaacagatcaaagtttggtttcagaacagaaggtcagaccctatttttcaaataacccaaatgccaaaatcttttttcttcttcttatacttcctctataaaagccttgaacttcacctatttttcatcttgtctcaataaaagaaagcaactttttgtttttgacattggggaatttggtgtgtaggtgtcgtgagaagcagaggaaggaagcttctcggctaaagcagggtat

SEQ ID NO: 4491 - DNA, 964 bp, Glycine max
caaggactttttggacatctccaatccaaaatccatgtatgaatgtgccacatatagttgcttctttgacaaaatctcataattattcatttatttgttaattaatgtattttactaatttctttctttcccttggtcatttgtgcagcttagagatttcactgaggagctactcttgtttaacaaccggtgacactataatgattccttacaacaacaagaaatattacattgacatagtggaaactaagccctctaatgcaatcagtgtaattgaaacagactgtgaagttgattttgctcaacctcttgattacatagaacctgagaaactgttgccatctgcttcatctgataaaggatgcactgaaggttgttattgtgattctttcttttattgtctgttggaatatgcttttaagcatttccttttttttccttttcaagtgtagaattcatttggagattctgactattttctttgtgtttaagttcatgacgattcggcaacacagactgcccagatcgttccattcactggttttggaagacgtgtggatggcaaaccttgtacacaatcagttgaagaaacttgttcaatgctaaatctgctaaagactgaaaaagaaaccaagaattgcaattctaaaatatcaaatactgcttcacgtagagcttctggaaagcttgtgtttgggtcaaatgcaaatacacccaaaattcagacacccccaaaggtgagtcttactattattaatctttatggagcaacagataattgctctcaagtctcatcctatggttcattgatatgattaaccaaattttctcttattaggcttctctgaaaataaaaactcaagagtcatctaagaaggaggaagagtcaaaatttcaagctttcacgggaaagaagtattccttaattgattgatctttgttttaaactataaagctatgcaga

SEQ ID NO: 4492 - DNA, 1078 bp, Glycine max
agagtgtatgattgtgctctccttcataggtgactaccaacatagatggatcatccagagccctctctacgtgtttgcgcgctggacaccctctaacactgctgcacttgtaataacctctgcaaattaataattccaaaaacaactcaattcagtgattcattactactaccatttactccacccattcaaaattaactccaaaacatcacataaaaatagaaaacactcaagggaaaggacagaaaaaagaaaagaaaagaaaaaagcatgccaggatctttctaaatttagcccatacgggaaagagaaaaaaggaaacaaattagatgattcaatttagtaaaacaaaataaaaaatatgggtccattttgaaatttgaaattgaatggtcaacgagcaagttaacatatacaaagataaaattataggtactagatgtgaaggtgcttatgatataattataatgttaagttgttatgtaccttggatggggggatcctttaatgggtttctgtccgtatttcctccaagaataatcgtctggtggaatatcagccatcttcaagcttattgccggtaccctcaccaccctcttctgcctcatttttctgctgcaacaaaccaatccaaatcagaatacatcagaaccacacacaacaaatatatatacatatatatatttgacaatttttaaggataagaaaaagagattcacacacacacacatatatatatatatatacctcttctttgaacaatggcatcggctagaggaactgccacacttagcagaacccaagttctcagagctacacttcctcttcaacgaagaggacgaaagaggaggctttccggcggaggagacctgagagagattcgtgatctgaaaagccgtggccggcgacggcgacgacgagcacggttgtttagtgtcggtatcgccagcggtgagggaggagacaaacgaatttgaataggagaaattaatggtcttggaagagtcctttctctcaattttggggatcagagagtggtcagtgacagagtgagtgtgaagggtgggtggcgggatct

SEQ ID NO: 4493 - DNA, 1369 bp, Glycine max
tgtagagtcgacctgcagaataaaaaagatataaagtaagaataatatgaagaaatagagaaaagtagtggttattgaaaggcaacagtggcccggtacacaagcaacaagatgacaatacaagtatgacattagtaattagaatacatgcacaacagcaaaaagcaacctgacattgctggtgtaacaaccccgttagccatcaccatggaaataccagcaagaacaaataatagtagaatcttcttcagagtcactgaagtctctagcctctccttgatttttaaagacctttcaagctcaggagacggcacctttagcctaaagcttgatattcgggcatccgatcgcaactgattgggaagaagactcaccttagcatttcgacaaatcaacgagtacaacgcaaaagtaccacctgtgcagcagttttaaaacaaccataaactcaagtgcagaacagaaaacaatactgaagaattatttttaaaatgctcaatttagcataccttccccatcgtcgttggcccacagaacaacaaggacgtacttcactaacggaatcaagattaaagtgtacaaaacaagcgacaaggctccgagaatatcttcatttccattaataggagccttcctaaacataacactgaaggtatacaaaggacttgttccaacatcgccaaacacaacaccgagagtttgaaaagctaagacaattccttttcccacactaacatcctgaaacaggacacgagcaataagagaataaaaacaacacaaaacagcacatcacataactaacacgtaattaatccaatccaatgcttccaatgtggaaattaagctagggaatcaagttgttttttttgtggaaatcaactaatcaagcttgaaaagccagcacaatcccttccccacactaacatcccgcaataagagaatccaaacaacacaaaaacaatgctcaacagtgacatcactaatgaatcactaatccaatgcaatgctcttcgatttaaagtttgggaatgacctcgtagtcgtttctgtgagcgccgggaacctcgagggcttcgacgtcgaaggaatcgatacggggaccggtgcggacgagtctctgttcagcattgtcctcgtcgtcggaatcaaacatggcctggtggcgcaaatcggcggcgtcgaaatcctcgatctcggagggatcctcctcgtcctcctggaagacccaccgcgattcggtcgagtcgagatcgtcctcgccgcctagcgaatggtgacttttcgttttagggtttgccatggaaaatgggtattgtgctgatgatgattatgattattgattggaattgaaatgaaatgcagtgcggaa

SEQ ID NO: 4494 - DNA, 807 bp, Glycine max
tcagcagcttcagcagtctcagagagtttatctgctatatcttttatagttgaatcacgtgcccgaaggtctcgagacaaattctgtagctcctcatccttcactcttagtgtttcctgtagagtggagtagcatcttcagaaccgaaaatccaaagctataaagaaccataaaggcccaagaaaacaataaatacctacataaaaacattccttgtctaattaaaaaacaaatcctttctctatttatatccaccatcctcatttcctcttcaaaatcttggccactacacccccaccccctttaatagatactataagagaaaagtgatatcccccaatttactttttcttttttttttttttgctttcgttccttttccttctttttctaagcaagtgaacataaatcataagtctgcaaatgtcagttagcgaagtaaacagtgatgaaaagggtagacctcccctaaccccaaaattgaaagatgtatttctttgtttaatacatgacaattgcgtacagagaagccttatcataattcaatttaagccatattgcgtatcttgccacaaccagtattgaatgcattatatacaaaagtatgacaattaattcatagcatcacacaatcaaaattcataaaaaaaaaatgaaaatgttctagctagtaactatctagttaagggtacattaggttaagctttgacaaaaaaaaaacacttttatgatatcacttttctttttaccttctaaggatagtactaaaaaaaatttccctcggagttttagcttattttaaaaaaa

SEQ ID NO: 4495 - DNA, 986 bp, Glycine max
attaaaaatatagtcagattttctgccatactcttaagaactaaattcacacgagaccagccagtgttcaacttgataaacgagtttacctgtctcctaataaagggtggcagaaattcaaatagggcagatgcccatggtgtaagctgagaagatatcttgtcaacagcaacaccttgtctgagtaaaccatgaatttcctgaggtacaaaaagataatggaaggaacagattaagaatgcatcctctatcaaaggagagaaaaattgtaatgctaatatgtaacggcaatgacaacaactgttattttctgatggttcaacaatgtaaacttgattgacaaatttcatgatgctttgtgctcaggtggggcttgactactgagaaaggaggaagggggaccttcaagagtgcatacacttcaggaatactctctatcagcccttctggaaggagaattactccatggtatttatctgagcaaaacagaggaatatgatatttagatctcaatacacacacacatatacaatagagaaattcagatagttcaaaccttgctctgctctagcctgaactgcatcagtaatctgttttgcaatttcagaaagggtaagctttgatgcagcaacctcctcacccagaattacctgcataaagcatataaaaaaaatagtttgtcagcatggagctatagcacattaagccataaatgatgtgagacaataatacgcaccatgtttggatgggactggagggtgcattccaaagcaacatgtgatgccttgcgtcccataagacggatgaaataataatactggaaaagaaaactcattgagaaaggtaattgaaaagaaaattaatgaaaaaataaaatacttacttttatatatttatttatacacacacacaatgatatcagagaagagcaagaaacactagactcattaccttctctgcaggtcgatcctagaggaaacccgggt

SEQ ID NO: 4496 - DNA, 1191 bp, Glycine max
aatgtcagtgccttgatacttggtatgggattacccttaggaaaaacaagggaactctgctgattttctgatccattgtcctgtgcatctggaccagaacctttccatgaaagagaaatcgagaaaggaaggctttcgttgacctttacaaaaatagcaacatcatatcgcatgcaaagcttagtatatgaataatttcacagcaatgacaattcacaaatatgtaaaaagcacagaagaaactgatgcatgaatttcctaaaggcctaaacacaggtagataccacagatatgtaattaaaataagcatcaatcatgctaagattcataaatcatacagtaattcctaaaggtcagtacagtttacaacaagtacagaagacaataagcaagcaagcttacaaaaccaacagtggcgtatgagggtccttctgaattgaaatgaaatagagaacaatccaacgtatgaaactttacctgaaattctcgtactttgaacgttggactaagaattgcgcattccaacgcacagcccctagcaacacactcactagcattcattgtccgcctaggctcctttttgaaaaactctgtcaatattttgttaatggccggtacccgagaacctgaaccaaccacctcaactgtgtgtacattttcaacggtaagacctgcttcagcaagtgccttctccagaggtcccttcacacgttccaaaattggaagacttagttgctcaaactcatctcgcttgatgaagccccggacatccttctcatccatcaagcactcaatgttgagaggcgccacaggattcgcactaagcatcttcttgatcttctcacaggcagtcctgagcctgatgcaagccctggcattctggaaaacatcaatcttgtactcctccttaaacttcccagcaaagtgatggaacaaaacctcgtcaaaatccctaccgccgagagacctatcatatgaatgagccaacactttcagctgccccttcttgaatccagcaatgcacacttgcatgctagcatgcccaacatcaacaaacgcaacattcagctgatcgttttctggaaggtccgttttataaatcccataggccaaggcagtggcagtcatttcctgaatcaaccgaagtgggtgcagaccagcaatcgtggccgcatccagcaccgcccttct

SEQ ID NO: 4497 - DNA, 934 bp, Glycine max; identical to SEQ ID NO: 2387

SEQ ID NO: 4498 - DNA, 969 bp, Glycine max
aatgttgttcattcttatgctgcaagctgtattgaaaagctcctgttggtgaaggatgaagggggtgcagcacgttatacttcagctgatatcaatccaattttccccgtgctgatgaacaatcttttcaattcctttaagctcccagaatctgaagagaatcaatatgcaatgaaatgtattatgagggttcttgccgttgcagatatatctgttgatgttgcacgagtttgtgttgaagggttgggctctcttcttactgaagtttgcaaaaatccaaaaaatcccattttcaaccactatctctttgagtcggtagccattcttgtgaggcgggcttgtgagagggacccatctcttgtatctgtttttgaagcaagcctttttcctaggcttgaaataatattgaccaatgatgtgactgagtttttaccatacacgtttcagttgcttgctcagcttgttgagttaaacaggccacccatcccaccaatctacatgcagatatttgagcttctattgtcacctgaaacatggaaaaggtcctcaaatgttcctgcacttgtgcgtctgctccaggccttccttcaaaaggcaccgaatgagatcacccaaggggataggctgaccaaagtgcttggaatatttgacacactaatccaagcttcaagcacatctgaacaaggattttatgtgcttaacactgtcattgaaagtcttgagtataatgctattaaaccatatatttctcacatttgggctgcacttttcagagagctccagaaaaggcggacagtaaaactcatcaagtctctcttgatatttatgtctctcttcctgattaagcatggtgctgcaaatgttgttgatactatgaacagtgtccagcctgatatttttgttgtgattttgaatcagttctggattcctaatcttaagctgattacaggagctatagagctcaaattg

SEQ ID NO: 4499 - DNA, 1209 bp, Glycine max
tcagtagcactgggtgtgaggagtgttggaaagctgccttaattgcagtcacccttagcccgccttagttgcaacctcttagagagctgccttaattgaaaatttgcaacctcgagggtggtggtttagttccacattgactagaaatgtgacctaattagagctcatagcttggaccgtcctcacctgtcatcaccttacaagccaattttgtggggttgagttaggctccaaacccaaattctaagaaaatcttgatacctattttgttcatcactaccttatcatttcagtgaactggaaactgtaagagtgaagagaaaggtataacttggtttatcaagttggtcaatgagatgataaaatcaatgctctatggcaatgagtgttaggtatgaggtgccaacaagagccaaaaaaataatgtgtcctagacatgaggatgttcagttggatgagtggaaatacaataaagatttaggaacaaatgaaactgagaaagtcggatcatcacctattgaggacaagatgataaaacttggctaaggtagtttggtcacgtgagagatgatcaatagagacaaggacaggtccagaaaacatctaggagggcaaaagtggacaaaactttctgcataattgtattagtggcagtgagacactgggatacaaggccatagattttttataatctatataaaaagctacaatctacatatacaacttaaaaaaaaagaaagaaaaattgaggattccccctccctcttccaagctgtttctgtatagaggcttcacctaataggataaggctcagttgctattgttgttgtaagattaatagtcccatcttgagaccagaacaaagacattggattgtggcctcccactactttcatgtcaacaaagaaacaacagtaatatggaatcaacaccaataactataaataaaatcattacaactaacgtacttccgggtcttcttcttttccttatagcgcatgacagcattgctgcggttagcagaatgcagagaactctcagggcaaggaggacaccagggaggctctcccatgagaagcattgaagaagcaccacaatcttgatagtcaccaacactatctttggtaacaccagagaaagaaatgtttgatagagattgccttgccgtaaaacaaacaattggttcagtttttgtactcatcattgagt

SEQ ID NO: 4500 - DNA, 1122 bp, Glycine max
ggagaagaaatgttgttaatgcttcattcaatgggatttctcattgctctttcttgttgaaggttcttttctactattagaaaagtgttgtcttttatagccattaaatgattcttttggttttacctatttgcaggtcaatttcattatattcatatattcaccttctcttctatcccatttctacctcattttctaattacatcattcatcacttatttcttttttctttttttttaaatctcttttcttccatccaaatcctccccatacggggtgaacttttataaaataaaattcgatttttctttacgttttttttaaacattttttttgggaaaatgatgggtacacactgagagagttcacaaaagaaagtataataggtgatacagaagagacaaagcgatagaagagagagaaatactaggtagagtgaaatgacgagttatttagagtgataaagtgttcatgtgttattacttattattattgtttattttgaccccatcgcctttttatacttttcttgaaatggtgtataggaggtgtaaagaactgttttttttttttttttgtgctttgctttgctgggttgttttatgttcccaaacccttttgtagtgcaaactctgtgtgtgtgtgtgtgtgatttctagtactctttgtctgtgttgatgttatctttgtcttgtaggtgaggggggttgcactgtctctagtgaactctgattttctaagtgtgagataatgatggatgggcggcggcattcagttgatattccaatttccaaaactcttgtggcactgaggagggtcaggtcattgagggatccaactactaattccatgagcaaactctcttctttggttgataatgtgcactgggaaaacggttctgccaatgaaatttccctccggttttcggatgccactcggctgtgtgattccgatgacaatgctgctttcagatcaaggaatttaggtttcaagggacatagggaaccggatgatgctgattttgtattgaatcatggcttgttgaactcaaggttgaagcctagtgggatgtcttgtaaggatgatcaacgagatgatgaactagtttactcaaagcctaat

SEQ ID NO: 4501 - DNA, 1276 bp, Glycine max
tactatgccctgcctcagggtcaattctggtctagtcaaacctggtgatgttggaaggtatttttttcacctcatcatccacttatctcttaataggaaaattcaattctccaaatattgtgtcaatttaattcatggaactaataataattgaatcagtaaagtctaaaagtatatccaaatactatttgagtttaatttttatagtgttgtaggtttttacattgtcaataaattaaaaattatgataggtataaattttaagtaacttttgtaaaggtcaatgaaattactatatacgacgagtatacattatttatttacgttatcagtacgttgactagtttctcatatctattaacagtgtaaatccaattacaaacccctaaatttattgttttttataaattaaaagtaactttaaaatgtgtttggataaaaaaaaattaaaattatgagggtgaaagaaaatgaatgtaaagagaagaaagatatgtttggtgtgtttctaaagagaaaaatattgatgcagcatgaggagtcacatgagaactgggacacgatggtgtacattaccatacctcgaccacgacatttagtaacgatgcaagacatggtacaggctctctgcaccgacgagcactttcatcgcgtgataggcaatggcgactgctcccttgatcaacgggtgcagttctatgtgccctcctacgctcgcatttgatcaacgttccgcgagctcagacggtgtttcttgaagtaaaggatcatcagtgtaaagggaaaagtcgcgagttcgagaatgagatttcaaaaacttatgaaagagaggatgaaggttataaaagaaatacagtaacgttttggaatgatcttttatcaagaatagaatttcaatttcttaccttttagaaggaaattaaaattccatatttttagttgtttaaaattctgttttaaaattctaaaaatttaaattcttcataaaaaatatccaaacaatgaattttagatcaaagaaatttaaattctcttgataaattatttttctcagttaaaattctctatccaaacacacttttaaacttatatttaaggtttcactgacagtatagattttcttacaacaatagtgcgtagaaattaatctgataagttcatgtaaatttaaatcattgaggtccgaaatgttagtttaattcactactatttgtttaactctggcatataaatttgtgagcatcaaatgcttataatggcagttggtttattactt

SEQ ID NO: 4502 - DNA, 1003 bp, Glycine max
acaattttttagcaacatatttctgtttctatggtcatcagctattggctggtaacaatgttgatattatcattttttgtccaatgtatgtcacttgttgttggttggtttgggagtttttttccctttgtatccccttagaaaagtgatttttatccattctggaagctcaaatttcatgctatggacctttaaaaatcaagtaagtttttccactgagggttgtggttgaattggtcatctatctgcctacacaaagtttgtgagtttctaaggcttgagccttggcttggactctttgtggataggtatgacatatgagattcgatcctcactggtgttgaacatatccccatccattctatgggaaggtcattggggagccctaaactagaacaattcccggaaaatgcctcttactggtagataggggtttaccatagcagctctgctgttcaggccaaccttggaatctccttctatgtaccctaaaaaggtgttttccatggcggcacgaggaataattatttttatgattgtttatcatttcactaatgctgatatctttctcttcattacaaactaattaaacaaggactttttgtttatagtcgatgggtttgggctttgcattgtgtcatcattatttcaaaataaattcagtttacctagtaagcatctttgtaagatacctgttgtaataatttatcttctattttcttcccgtggatttgccaaactgcttgcaacatgcttgttagttgatgttcaccagtcacttgaagtcaccataaaagataaagcttcaatttttctttagttgagaatcacattgaaatatttaaatctgtcacataagttaagttgtcatcatcatctttatcatttatgattctctgttctctttatgttgttgttaccttgaattctttaactgttaaactactaatatgcattatctaagttcattcatatggttctctatctgcaggcatgcaagctg

SEQ ID NO: 4503 - DNA, 1213 bp, Glycine max
agtgataatatataacagcttacacatttacacaacgaaacacaaggtcgatcgatcaaaattatcaaaagcttttttcgtggggtctcatgatctcacaccaatattatttttagctccttatatatatatactattcattcttgaactagatactatgtttggaaggcggggagaacaaaccaacaaaaaagaaaacgaacactactttttcactcctttgtgttacaaaatagcttggccgagagaatttatagtgttatttcaatcaatccctatattatacaatcatatttttaattataaaaaaaataatgtgtcacaagacactattttattttatttattagattagaaaataaacaattttacttagtaattaaaaaatatcaaaaatatacatttttaacatttgtttttaagtaatacatcacaagacatttttaagtaattttattagattagatggtaaatctgataactcctcgaaatacaaaagatagcctctagtgtgttcgttttaaataagttccccctgccccataaaaatgaaggcttaaatagaatagaaatcaaccctcacataaatattaggctattactttttacgcaattttttttttgctattcacactcttgaatttttagtttttatttatttatacccctcatcagccgaaaataatttttattttcacgttcaagaaataagttttaaatacatcttgtaatgtattccagaagcaagtttatgagattgcgcaattattaaaattctaaaaactttacactatttattcccgtgttacatttttaaagtggatttaattaaatttaaatttaaatttagagatagaaaccattatgcatcaaagtaattaaaagaatttactatcttttaattccttaaactttttaggattttttttattcctttaactctctttttttgtacttttagagttttagtccttaaaaataactaaaagtatggatgaaaaaaaatgttttaagggctaaaaataagaaccaaaaaaatttaagggactaaacagataaaaaaaaagttcggcagctaaaaataaaaaccgtaaaaagtttaggaactgatagtttaccctaattaaaactaaatgttttgtgatggaaaaccaggtcgaagacaaaaaaacaacactaacgactaactctagattctagaaaacttgagcat

SEQ ID NO: 4504 - DNA, 1110 bp, Glycine max
tcgacctgcaggaacatcatctccatagagccctatagtaatgcgaccaacaggttcgccgtcaatagatacgtctaagaatgcttgtttggtaggttttctttcagtgcagctgggagtggtagccacattctcttctggtttatcactacctgtgttagcaacatcttctgctaaagtcagattctcttctggttgatcactgttccttgtgttaccaacatcatcttctgccaaagtcaaattctcttctggttgatcactgctgcttatgttagcagcatcttcttcagcaaaagccagattctcttctagttgatcaatgttacttgtgttaccaacgtcttcttctgctcttgctctggatccatccactgcctgagaacccaagagtagtagcaagcaagagttgctaaagattgtgagctctctacgtgagaatctgcattgctgtttgaggattggaaaagatggagaagtgggtattaattggaatggagaaagtgatgatgctgccgtgcgagttggaggattgaatggctgagcggaatatcgcaatactcttgggttttgcagcatttctgcgttgtggtacttggcactatttggggattggtttatgttagtgtctgcatcggctgctccgtttcatgtatagggagatcatgagatttagaaaagaaaacgaaataagcaagaacaatagatacttaggaggttttcatggataagaaatatgttgtatggcagccatttatttgtttcatttcatgtcataattttaggtacactaattttcgtggttccctttagatattgagaaacaaatatgcggaggaggtcccgaaaatatagtaataatatacacacatttgctccagcttttcgcttcgcagtcattgtgtcatttaggtttaattactctttctaaaacttcaatatgcctggtttaactttttctataattattttaccacctttttttttttacttcttttacacaccattaatcattttcatgtgcagaaaataatgtataaagattttattggaaatatcacgaaacctcctcacatggaaatattttattggaaaactagcattttaact

SEQ ID NO: 4505 - DNA, 1161 bp, Glycine max
gaccgaggcaggaattgagtttaagggagtcgaagattaaatccctcattttttctttctctatggggtgccataaaatttctaacttaagaatttaaaggaagttaaaaagaggacaaaacttagagacagttccttaagtatttatactacctcgatttctttttatctatctttaaagtttttatttaaaaataaaaaatataataattttttatcttaataaaatagttatgagatttcttattttacaattttttatttctacttcacaataaatacatatgtgtaaattaagggtatactgctttgatctcaactataagaagaaaataaaattgatttcacaattattataattccttactaatattgttattattttatattatcaatttgcttaggtttaaagatgtattatactcatttctcaaaatttaaatattcaacattttatgtatattttgtcattagtataattagaatggtaaataagttcagctatttagtttaaagttaacaattaattctcaacttaatggttaattataatacatggattcattgtgattaattgtcagctcctgcttagttataacattaaatttatttaaataattgtcaacttattagattaatcaataattgtttacctaattatcaattaaataaatgagcatgtattatattatataattgaaatactttgttaattgttgagtccatttgtttagttaaccatacatgtgagtgtacactctcataataatagtaataaataaataaataaaagctcatctatgtcagccgatgttaccaatttatattcgtggtacaaaagaattacaaatatattcgtcatccatttatgttttagagagtcttttgacagcaatttctgttccatcttctaaagtaccctgaaagaaaaggataaataataagtatggcaactaagagtcaaagcaaaattgtacatggtttgcatgcacatcaaaacttcaatgacaccttgtaaacaggtccaaatccaccttctcctaattcggaaaactttgtaaagttattagtgctctgtcgaatccaaattaaagggattgtaggaaggtctgcattcagtgcatcctcctttgacctccactgcaggcatgcaagctggcg

SEQ ID NO: 4506 - DNA, 1103 bp, Glycine max
ttgcatgcctgtcgtgatgcacagctgttaaactagagacaccaagatattgttttgttccccttcacaatgtgtggtgatttttaagccattgactataggtgacaaataaaagctaattaaatggcatttcaaaaaagttaaattaacccttttttttccttttttcttcttgtatgttccaagccttagtttattagttccacaaacgaaagtgggaaaggaacttccgaaagtgtgaaaaagttttggcaccaaaacataatcatcacctcgtaatcaaggtccatcttcatcatctagtaacagtatagtagcacttgccacatataagggaaaaggcacaacacggccacagttaaattaattaaaagaaagaaaacacgttctaacagttagcacgcacacatagagagaaacagctgtttgagattggcgcatagatacgcagggtcggtgagtgaagtcagaaagtgaccccatttagtttctttgtgcagccgcgttcgctgagtgcgtgtcccctttcatttcattcttatctgataccaatgcctttttggaaaatgctgacctgtgaccctatattcctgagtgtaccctgctagtatatatacctcgcttcttccccttgctttctgaaccaaacaacaaatattcatggctttctttattctctccttcctcttccttcttcttgtttcatctgccactgcttgtgatcgctgcttgtatcaatccaaggcttcctatttctccaaagcttctgctctttcatgtaattaacaacattcattattattattatcttcaatttcaggccaagtatagaatgatcatactaatttaattattatgtgaatttgaaattgaattagctggggcatgtgggtatggctctttggcactagacataagtggtggacaccttgcagctggtgtggattctctcttcaaaaatggagcaggttgtggtgcctgctttcaggtgggtgtgtgtacaattatcaggaccacgtccaaccaatttttatttcattaattattattgtcatgagagtagtctaatgaacattttttttaatgtaattaatggatgatat

SEQ ID NO: 4507 - DNA, 1200 bp, Glycine max
aaatcccacaaatttcataaataaatgggggaaataaacaatatttccacatgaaaattctttatagaactcggaatatgtaaaaaaaaaaaatcacttaaaaccatatttctacatccctaaaaaaaacaatatttctaaacatctcaacattcttacatttaaatttctacatcttttttttacattattttttgaaaactgaagaagagataaaatgacatccctggtttaaaaactagatcctgtttttattttctatttttacaaataactatgaagtatgttagtattttaatttgtgcattgtaacagataaaagaatatttgtataactatatataaaattagataatgaaaaatttatttctcaaaacacattctcacacaccttttcccggtcattttgtaacgggggagtatacaaatttacatgtaagaatattatttttttttttgaattttttcacgaaacaactgattttatgaggtatgagtacttatccccacgtttacttatgcatcaatcattcttgacttttttaaaaaatagactttatcaggaagttctttgctgcttttgacgtatttattcaccctcagaaggaagggatatagaaacaaatatattgggaaaaaaaagacagaaataaaagaattaataaaaaaatggatttaaaaaatgagacactaaaaataatgagaggaagaacgctaacaatacacctcttaatgcatctttttaaacatattttattaatgattattaaaaattataaaattaggagatcgagagacttatttaataaggtatgagattcatacttttttaaaaaaaattaaataaattttaataaaaaaaaaaaaaagaaatgttgaatttaaaagagggcgtccaaagtctgttgttacttgccagcatatttgtataaaattaggatcacgaagattgccgtgagggtaagcaagtgcaaaagcactctcaaaacattgaagggctgaaattctttatagtttttaccttggagaagaagagggacaaaatgtgacagtgtaatcagcagcggtgcacgtaaaagtgctcgtagcatcatcatacgcatagctataagattttgggcacgcagccttgaaaatctgcgagtacatcgacggcgcgcacgccgccggtgaattaaacgcgtcgctacaggcatgcaa

SEQ ID NO: 4508 - DNA, 1110 bp, Glycine max
actgcattcgggatgcgtggactacaagcacaagtgcatgtgatgatcagaattcaactcccaattatgaatgcaattcatttatttttgtatacggtgacaatcacaaattcataatggagtttgaactcataaactcttcacaagaccaggccccagtgggtccaaattatgactgcaatagtacataccactgtagataaattaagtaaatttagccaaatagaagaccttatatatgaaacgagtcactttcctaattaagggcattcaatatatggtctaaacacttatttcttagttattggctgcgttcaatcggcactaatgttcatatagaagatatacgacgatatgaatctcaaatcaacgtcaatcattttccttctgctcttttttttttttttaataaaactgtaaggatttagctagcttacttcctgaaacaaaacacaacattaagaacatttaaggaatgtttaaatatagttacaaattattaaatttgttatacgtctataatttttactttctattagtttttttaacgggtataaagtgtacgtttaaaaatgtttttatctctgtaattctcttatcaaatagactgcttttatttgattttggtacttatagaattgttttttttaaatagtccttgtattttatttttttgttcttgttatttactttagtccttgtattttagtttttagtccttaaatattattcaaagagatttattcaaaatgaacaaattattacagtgacaagcataaaaaaaacaactattatagtgactaaaatgaaagatggatatatattaaaggattaataaaacaaaatagcattgatcgaaacaaaaagaagaattttacaaggtccatttggaaaaaataaatttataacgaccaaaacaatttaagataaaaacaatatatagggaccaaaattaaccaaataaaagttaatgaatacatcattttataaaatttgataaactaataattctctctatttctctatatatttatatctatcgatggatgaccttcttttctggcacttcctgcatatgtttactttccctagccttctgctgttagagct

SEQ ID NO: 4509 - DNA, 1165 bp, Glycine max
ttgcatgctcttcagcataaaatatataagcataccatacaaatgagtatttcattctttgcatgcatgcatgcatgcttgacaattttgcaggaaatagaaccaaagaaggtttacttctctattggtattatttggataaataattatatcatgaggtgttggaatctgatataacttcttccctgttgggatttctgttattctaattcagttatatatggccatggcttgatggtttctaacattgtcaggaacatatttctgtcagaattactgattgattagcatttagcaataaacttcagtaaatttggcacataaattattgtgttgtaactgaaatatgaaatacaaaagaactaatgttattgtattaatttcttcttatgctgtttttctttgcctgccgatttcacaatcccactaatgactaattttggttgactatgttttggatgcatattttggtaggttcaaatcctaggagttctctttttcttgttaacaggaatgtgactttcacatatctgatcatgtttggatgcaattttatttttcatctagattatttaattgatatatgggtttattgctatattaagttattctgtcatggggtggggttttgctgcatcgcagctggccgagctggttggctcaagtgtttgcaagccagtaagtttaatcagctgctaaattaagacagggcacaataccagctcttgactgctcaagtttttgtggtgcaagatagattatgcccgacattttatctcaatagtcacaagtccctttttcttccaccattgttctttggataaaatttgattgcagtttcttatgtgcttttagtattgttctccaatcaaaattagagtttgactatagatatattcaatgattctatcaatactagtctctttaggaatacatggaatttgtgatggggtggggttttgctacatcgcagctggccgagctggttggcttaagtgtttgtgagccagtaagtttaatcagctgctaaattaagacagggcacagtaccagctcttgactgctcaagtttttgtggtgcaagatagattatgccctacattttatctcaaatagtctcgagtccctttttcttccaccattgtccatccttccgacaaaattt

SEQ ID NO: 4510 - DNA, 990 bp, Glycine max
ctatcttgaagaatgaaattggctggtttgacgatacaaacaacacaagttctatgctttcatcgcaattggagactgatgcaacattattacgaactatagttgttgatcgttcaacaattctgttacagaatattggtttggttgttgcttcatttattgttgccttcatcttgaactggagaataacacttgttgtaattgccacatatcctttggtcattagtggtcatatcagtgaggtgaggttccttcttgctccacatttcaacattatggaactagcatacctgtttgcgttttaatacttccctaggatcatttcagaaactttttatgaaaggctatggtggcaacttgagcaaagcatatctaaaagctaacatgctggctggggaggctgtgagcaatatacgcactgttgccgcattttgttctgaagaaaaggtccttgacctttatgctaatgagctcgttgatccctccaaacgctcacttcaacgaggccaaattgctggcatattctatggcatttcccagttctttattttctcatcttatggccttgccttgtggtagatgctttaacttcatttttatcttaaattaaataggtttcttattataggataaatgactcatcaaatggtggttacccatgtgctgagagtgtataccttttgcaggtatggatctgttttaatggaaaaggagcttgctagctttaaatcaattatgaaggcattttttgttttgatagtaacagcactggccatgggggagacattggccctggccccagaccttttgaaagggaatcaaatggttgcatcagtttttgaagtgatggatagaaagtcaggaatatcatgtgaggttggagaagagttgaagacagtggacggaacaatcgagctcaaaagaatcaatttcagctacccttcaaggccagatgtaattattttcaaggatttcaatctaagagttcct

SEQ ID NO: 4511 - DNA, 1255 bp, Glycine max
atgtccaatgaattatacaacactattgcccgtgtaactgatggaatttatgaaggtactgcccaggtttatttttctgtatttcttaatgatggttttgaattatattgtaatatcctgttttgctacaggcattgccattggtggagatgttttcccaggttccacactttctgaccatgttttgcggtttaacaacataccacaggtaaaatttcacttttatcttgggtactgtatataatatctgcaactcattaagaactgcaaatgatttggagtatgtccttttcttgtgaatgatcagtttgtatttacattaaacctcaggtgaaaatgatggtagtacttggggaacttggtgggcgtgatgagtattctctagtggaagccctaaaacaagggaaagtgactaaaccagttgttgcctgggttagcggaacctgtgcacgactcttcaaatctgaagtacaatttggtcatgctgtatgtcagtggcccaatatttttttactaattcgcagttatagcatttataataagggagccaaattcctgatgttcagtggcacttgtataaattagggagctaaaagtggtggtgagatggagtctgctcaagcaaagaatcaggcactaaaagaagctggagctgttgttcccacttcatttgaagcttttgaagacgcaataaaggaaacatttgacaaattggttagtttatcttgaaatttttcatctctctaactgataattttaccttgtccccaactccccatctcccaaagggagcaatgttttaaagaagtgtctttagtttttagttgcctagattagcttgaatatcatagttgttttttcttttgttaggttcaagaagggaacatcacaccttttaaagagtttactgcaccgccaatccctgaggaccttaacacagcaattaggagtggaaaagtacgtgctccaactcacattatttccaccatctctgatgacagaggtatgttgggatccttcgaatttataagttgtaacatggaactgaggtgtcctagacacatttggtagctaaattaaacttttcttccattatttttccaaaggtgaggagccatgctatgctggtgtaccaatgtctaccattattgaaaatggttatggtgtgggtgatgtaatctctcttttgtggttcaaacgcagccttccccgttactgtactcaatttattgaggtagattattcatactctagt

SEQ ID NO: 4512 - DNA, 1229 bp, Glycine max
cttgcattgcttgcagtatacaaataatttcaagataataaaacgaatcacttagtatagccttactaatttaagtatcaacaattatgtattggcattggatccacaacaagttcaacacaaatatcatttagaaaatgagaaaacaaatgctgatgatgctcccaacaaaaggataaattattaatgtccaaccattccagtaattgttgccttaactcagcatcattgcccactactaactttcctttcttcctcaaaagttgaccatcccaagtgtagtgtcccaaattacctcccttccaagttaaatgagacattaaggcatgcaaatctgcatcttgctcccaaatcttctcaattttctgtagaaattctgaggacgaagtatcaagtaccatgtgcattatttgctgacgtggcagcctaggaagtgcatcagccacataattatcattgcccttcttatactgaatctcgtaatcatacccggctagctttgccaaccaaaacatctgaaattaagtctttaacttctgacccaacaaataccttaagctttgttgacctattcgaattataaacctccacctctctagatattgatgccaatgctccactactaagaccacaaccatcaattctttcttatatggaaaaggattgatgcctcggtgctagtgccttgctgaaaaatgccaaaggctgccattgcaacataagtacaacaccaattccatctccacaagcgttcgtttccacctcaaaacccattgaacaatctttgagtgctaaaacttgttctgaaacaagtacattttttagtatttgaaaggcttgagatgatgacttagaacaattaaaccaatttttctagagtaaactggtcaatggtttggccaaagctccaattcttgatgaagcaccaaaaataaccagctggtccgaggaattctctcagctacttcatatttgtaggttttggccaatcacttattgcttgaatctgcttagggtttgtagaaacccttttattgctaataatgtgccccaaatactccaacttgttggctacaaatgtccacacacttttcttcacaaaataatggttttctctcaagattagcaacatcatcctcaaatcaacggtaaaatcttcacgctgcattttccatttaaaattcttccacataccatacaccttcaatctttttactccaactaactcg

SEQ ID NO: 4513 - DNA, 1023 bp, Glycine max
cgggaacgtggagctaataaatggaaatggatctgttaaacttatgagatgtgttaaacgccatcgaagatggagtgtggccaaggttggtttactggtttcattttcttaatttcttcacatattctttttcacttcacagattgaaatttgattgtccctttttctttcttttcttttgggtgactctttgtctgtttatcattttagataaaagctgttcattggacgcgatatttgctcagatatactgcaatagagatattctttagtgattcagttgccccagtatttttaaactttgcatcgcagaaggatgcaaaagatataggaaacttgatagttactacaagaaatgaatattcatttcccaaaggaagtggaaaggataagagtggatctattagttttgttgatcgacgagtggcacaagaaatggcagaaactgccagagaaagctggaggagaagggatataacaaactttgagtatttaatgattctcaatacacttgctggaagatcttataatgatctgacacaatatcccgtttttccttgggtcttggctgaccactcatcagaggttcttgattttaacaaatcatctacatttcgagatctctcaaagcctgttggagcgcttgatactaaacgatttgaggtttgtttgttctattattattttaaatgtggatggtattggtctttttttctttttcttttttaattatcattcttagtgtatgcttcttaaatttaggtatttgaagatagataccgtaacttctgtgatcctgatatacccaggtaatttggtcaggcttggtttaggatttccagtgatcctttatttatcgcacacatgcgcgcgcacacacacaaagatagatagataactttctgtcatgtaatggtgtttgtctattgatgcagtttctactatggatctcattactcaagtatgggcattgtgctttattaccttcttagattggagccctttacctctcttcaccgtaat

SEQ ID NO: 4514 - DNA, 1214 bp, Glycine max
attaaatcaagtcatggtgacgagattgaccagtctcgtcctcactaagtatatcattgaccgtagaattttaataataatagttaaaaataaagaacgttctaaaattgaatattaacaatgctgaatactcttaaaatttaatagtacttataactagaacagtagaaccatataaccaccgatagaactttaccgctgttaagaaaataatagcagcaaaaataagtccaaaacggaaactgcaatatgtataaataaaacaggaactgttttgttaatctagatttttacctttattattggagtagtgattgttagtaatagttaataattacataaaaatatcgtaagtaaagtagctaaacaagcccaagaaattaggaatataatcaataattaataaattacggcacccaagacgacaaaggagaaagcatcacgtaaagtcgttaaaaaaagtaaaaacctttctcaaagaataagcaaaatacatatccagactcgaagaacaaaatgttgagtacggttaacgacaaacacgaagaagaaacgtcatttcaaaacgacgtgtcaaattttcgcgtttcagaaactggaacacgcaaagatgcataagcagatctcagaagtacaagctcagatctaaaagcggacaagttaggttaccttcggagatagcgttctgtatctcagcgcatttcacaacgacgctgtggtcgttgatgccttcttcctcttcaatgaggaagtcgccgtagccgtttttgttgttgcgcggcgacgacgtcgttccgttgcggtcgggagtgagcttgacgcgcgacacgaggaaccactgcaccagcgagaacacgatcccgatgacggcgcacactggcacgactatctccgtcgcaagctccgacagcagagcagcacccatcctcgccggaaacctaactcagccggtggcctgaacggtgggaaaatgctgcgcttggcggaacagaggcagtcacagagaacgtgtgtgagggaagctcgagtgcggccaggcatgacgagatttatattgggagagagagtgatagagtgcgttcggtttctgaacgtgaagttgtacccgagattatcaccgttgtattggttgcattgagattttcaatcatcctacggtgagtgccaacgaacattccaaagaaatgtgagatcttactttagtgtgttttttt

SEQ ID NO: 4515 - DNA, 1065 bp, Glycine max
tcaattcaataaaacaacatcatataagctgctatgcttagctaagctgcccacaacatggagtacatcttaatttaggcgagattgttctaacttaatttgacagatcttgatttgattctctaaaactaatttggctagaattgaatttgtaatgatataatttaatttaaaagttatcatctctttatttgaaattcattatttgtaatataaaattcttaatacaaaggttgtattttatatttttagtaatatgtagcttttaagaacaattaatcttaatcacaagaaactagagcgacacattcttatttttgttaaatgattggagcttgaggatagtaagtacttccgaaacattccttgaggcccatattttgtgaaccagaacacattcataagatgaggcagtatcaccaaactttctccacattcccctcccctgaaccaaaaaacaaaggctatcacatacatgatcgttgagatggacaatgtgccttggtaagcactagtaggtccagttagttgaaactataacctgcaacctatcagcatcatcacaactctttaaaaacaagtaacttgttggagttgatactgatccctatcacattttctattggtccctaccacttggtaaacaatgaatgtttattgagtttgaaattgatttgttgttgttatgtgtgggtggttaacatctatttttgtcgtagaaaggaaggaagctagctaatagatttacacacaaacaaaaaacaaagcttgttgaataaaaagtctacaacattaagtcaatatttggtttaatcaaagtgttgaactttagtcaatatttggttcaaaaaacaaagcttgttgaataaaaagtctacaacattaacatctattctagtttgtgacgccgacttttgtgtggattttgtggcatgattggcattgccatgacctttattgttgcttgtgtctttgctcagatgatcagtggtggcagagttatccaattgtgtgcttttgtttgctgtccccctttgaggactttttggattagctacttctgcc

SEQ ID NO: 4516 - DNA, 1292 bp, Glycine max
ccggtctttcctagagtcgacctgcagatattgatcaggatgcactcaaattagtctcatcgaaatgggagaacagaatgacattacgctgacatgggagaatttggaagctactgttacaaatggaaagaaccgaaaactaattcttcatgggcttacaggttatgcccagccagggagacttttggctataattggtccttctggcagtggcaaatccacacttcttgatgctttagcaggtaattactgattaatagctagtttactgaaatttatgtaccacctttgcatgagtatgactaagtgtatgagtctaacagtaggtgtctaataactagctttataattaccattcttttcattcttcatgtattgtatagacacttcacttttcaactgaagcatattttgtacaagcatgttagttttttttaaggaaacctttgtaaattctatttggacgtaaatgaaattaatctagactcagtttaatacatgatagaaaaaaaaaagtataggagttttacattgatggccgtagtacagtataatcagaagcagtttctttttgtttgctggaagctatttattttataacagttatgatcatataattcaaacgatgcaggaagattgacatcaaacataaagcaaacagggaagattctaatcaatggccacaaacaagaactggcttatggaacatcagtaagatcgggaacattcttacaacaaaaagcatcttttgtactagacatgcaaaacttatagtaatcaaaatcttactattcatgatttaatacaaattggctacctaccaattcttatcatataagatgaatcttacatgatttatatttatatatacatatgaatgaatctatataatttcatatcatccacattaatcatccgattcaacaatttgttattttttcctattcttttccttttctttcacccatatgtatgtacaatatttagctttttaattgcttttttccattcttctaaaataaggttttgcacactttgatataactaataattttgttttataagacttcacgttaattttgttttataagacttcacgttaagttgttatatgccatctatatgatcaaacatctttcgattcgatagaaattatgattgactactcaaaacattatagctcaactattggcaattcaaatctcaattggataaccatagacagaagaatatatagttgtaaaaaaggagtttttatttatttattaacttctctcctacatcatgtaaat

SEQ ID NO: 4517 - DNA, 1166 bp, Glycine max
aagttcgtaccatcaattaattagattaacaatattacaaaaaattaaatgtacaaaaaaatcaaagggagtaattcttaactttaataactgtttgttaattaattttatctttgacatcgttgtgtggtaatttatttgatcgctaatattatgtacataagacagtaaaaaaatattaatgaacaaaagtgtagtaagacactttggtaacttataagttgctattttgactagcctattttgactttttattattatgttagaggctaattaaattgattgtagtcattagggctcgtttaatgatgagagattgaatagtatgcatgagatctttgattctatgatacaagcgtacatatataaaagagactaaatctttggttccaactttagtataacaatcgtacatataaaaaatattttaaaaaaataagattaataaataaggtgtcttcaccatttggggaaaaaaacatttgaaaacaaaacctttttcaactaaagtctttgaaatcaattttgggcttggaagtcaattaattaaagtgataatacttgatttttagaaaattgtcatccttaattgaatatgcaaaacaaatgtaattttgttttattgtttaacttgtaaaaaatgtattagaaagataatttgtgtgtgtttgtactctaattaagagtgattcttgctcctagtatttctgggtataatgaataatttcaaagttgcatatatattctttttttggaaaaattgagttttttttattcttatatttgaagattatcagtttgtcttcttaaccaacctttccttgcaatagaggattgatggagcgctttttatttgaaaaaaataatttaatttttaaatttgagaattttgggatttagcagattttcccaacaaacagaattttggggttgtagaaatacgctaattttgtagaatgtgagacatcatccctcagatatcgatcagcgtattttgaggcaaactgatgccatttagatgagtctccaacatagcagtttcttttataccgacattgctatgaataattctcctgaggctatttcgtgggtgcctcctcctagccaataatacaagcttaattgtgatggttctgttcaggagcaaaggagtattgtattgcagc

SEQ ID NO: 4518 - DNA, 1056 bp, Glycine max
caccgcatttatgtcgtcgtcttctaatttatgaaaatgtttagcagcaaatctttgttcttcatgcagagaatcttgtgtactctttgaagagatctcattgttagtcatttcccttgcaggtctacttttaaagtcctccttgcacacactgcaaatagttgattcagatgttgttgacccatcttttgagccactaatactagtagaagattcaactatgtagctggtaagattagccatcctggtctcaagattgtcttctgcactggttgaaattgttaccacatcattaggaagattgcttatctgtatatctgcatttccctcaattggatgaatccgttccaaacaatttactaaacctgcttctttgtccttatggtccttgccaccactagatttattaggtcttcttgctttatcctttggattaactaggggatatacaggaagaacattagatgatgcattatgacagcgtagaacataaggttgtaaaagcggatgccttaacaattcagctgcctgtcaatgaagagaagcattgttagaatccaccattccatccaaattaatcacaaaagacaggttcagttgaactcacggttggcctatgttctgggtttttcctaagcatgctcttgataagttgtttcctgtcacacatttgccatctttcagttttatcattatacgcaatataaaacataagatgaaagaaggggaaaatatgcgattgcaagtgcaaaatttacaggggaattttgcttgacttcaatatagttgtattcactttgaggaaaaatacttgaatcaccaaaaacacaggttaaaaatatatcatgacaatagtgtgactgcaattggtttgaggaagttacttacagtgtggaagaataaacaattggcagtggagaaatggaggatctgtttattttattgataagtccagccatgtcctgttttagtcattcactcatgtgttaaattattttgctggtttaaatatatattgaagaatagatattatgtttccatttataaaactaaatt

SEQ ID NO: 4519 - DNA, 1122 bp, Glycine max
atgtttcgccagcttgatgcctgaggcggcacagtggcgaacatcaagctcaaggcctgggcggacggattgttgaaattccacatagaataaagatattgtcaatataaacaaactaataattcttaacttaaaagttaattttatatcaaaagttgagtcaatcctaacattaagatttcaagaaaaaagcataaggataagaaattgagagacaaagcaaaatgatgttgaaataggaatcccattttaacattaattttttgaaaattaatattaatgatgacattttatttaaatcgatattaatttgacgatatttaaataaaatgataatttttgttaaaattaatattaatttgactatattaaatcttatttttgttataataatgtgtttaatttgtgtcattgttaatggaggagagagaagtaacctcagattatctttcaaaggtggaagaatccaataattttagtagggaatagaaatttgaaaattaatcggtggggtgccccccattcttcagacgtggatccatccctatgtcctaacgaaaggaagtttgatagaccaagatcacacacttgacatcattcacatattagaatcttaaaaaagtgtattcttcgctaattgaaaaaaggaaagagaaaaaagttactttattgatgtagttacaacgtaaacatggccatctgtatgaacaaaaccaaaacatattttgcctttgaaggaggagaaaataagaaaggacacctagggacccgacatattggtgatgtataaatacaaagttaaaagtgcaataaaaaataatctgtaaacatgcatacgatgtgaagcaatatggtagtgtgaaagaaagaaggaagtagtgatcatgaggaagcaaataggagtagtatgtgagtgtgctgaattccatgcagcaattatggctccccaatcaatttccatagtcttccaaaatctcatgatggtggagtgaataatcagatatttgatgggtccccatgtctctcaaacctcttttaaaattttcaaataaaaaaaaaaaatacttctttatatgtttcacagcaacggtggttcttgaaagctttcaaaggaatgttttt

SEQ ID NO: 4520 - DNA, 992 bp, Glycine max
taaaatttggtgctggtaagtagtatccttaaaaaaatgtcaaagtttgcttttggacgttgaaaatcatacacaaacatacacaaattaagccaaagattaataaacacttgtatatagatagcttaagtgaagtaggtcattgaaaaatcaaaatttatagctaaacagcatagacggctatacgggtatagcattatccatttgccaacgcaaaaatcggaaaatcaattcaacacatgacgtgcttttgaaatttcaagtctataacatggcactttcaccagcgaagcttcacatggcactcccacgtagctgggaaaacgaaggagttgaattgaagattctcaattcgtgaaagggtatccgtaccccaaaaaaaggatgggctgaacaagcatcactaaagtggtgttaatttaagtacgtttcatgcaaaaaagaaccttagccgattgaagtaaaaggtttggcaatgactatgggacatgaagacgtgattcaagcatcaaccatgtgatattgttgccctttaaacacaactccgattcactcacttgtcttgtccacgtatgatatgtttcagacagaaattaagagactctgacattttgaagttcaggtcacatgtcaagtagatctatcatatatgaattgggaattctatatgatgatgtaaacctgcaaagagctagcttttctaatacttttctgttattatatataaacctccctattatattagtattttttatgaaatttttactcactaaataaaaaataaaatattctcttctgtttgaaaaatattgaataaattaatttatttttatttaatactactttataaagaattaaaatgactaaaataaaaaagttacatcattaattagtaattttttaaaagattttggttaagatacgtgttctagtctaggattttctttatggcccaagacagagacttgaatcctgcactcgcacgagtgttt

SEQ ID NO: 4521 - DNA, 1250 bp, Glycine max
attttcgaaatatttattacatagcagcaatttatctcacagatacatttgtcacatttcatgtgtggcctcgaaatttgacatttatctcccagaactagaaagaaaaatgcatcgtgtttgacaagtactcttcaacactcgccttagattttgctggatcacctgaagtgtgttattttaatttgttggattttgatatatgccctgcactcttccccttatgctaaagtaaacgctattaatttattagtgctagtgactgtaacataaaataattagcctttgatctgaactagttgaaagaaaactatgattaataattcctattaagacaagcatgaatagacttatgactcacataattgacgtgttaaatattaactggtgtcattaaaaacattatcttcttttaatatacagtcctttaaaactctgaatatgaactactttatttaaaactttcctatgccaaattaatggaagttcttgtcaattactagtactatatttattcttatttatttatttactaaacaattttacgaacatcgtaaaagctgatttttttgaaaaagtaattgtttgaaaaagtcatttcataataacaattttagtctttaagtgtctacatgatggcatagatatataaatttttaataacagtttttaatctacttctaattattagttaattttctttcttattgaacaatttaaaaatcatcttactttttactctttttccttcccttcttctttctttttttctttcttctattttttcctaaatcaaacaaagtaacaaaccataaaagtcttctatatcaataataaggcttcttgtcaattgctatatttattattattattattattatttatttactaaatatttttacaaacattgtaaaaactgattttttttttagattcaaaagtactaacaatttgtaagagtcattttcataattctaaattttttaacacttaagtatctaatgccatagataaaattcgtcaaaattcttagttaactttttaattattattattattattatactatgaaaccctagctaggtctaagactgagattcacatgctagaaaggcgcgtgggagaaaaataatccaaaatggcaataagtcaaaaaaggcacactaaaaaacaagcaaaaaaaaaatatcttaatataataaaaatcttctcaattatcttctcagcactcacgccttccacaatcaaat

SEQ ID NO: 4522 - DNA, 1127 bp, Glycine max
ttgcattgcctgcagagcaatggtatcagcagcaacaatatcaacaatactaccagcaataccctggacaagatccataccaacagcagtatcaacattactacccctatcaacagtctgtggttccacagtaccagcaggcctatggtcagccccaacctcagtctcaatcacagccccagggccagcttcaacctcagtcccagccacagcctcaacttcaaccacaacctcaggcacaaggactgtctcatccacctacacatattcaggctcctgtggtcccaccatctcagaatcagatgcaagttcaacaaccaccacagcaacttcaacctgctgtgcagccacaaggtcagatgagtcatgcaccaggccatggtcaagccatcccccagtctcagactcagccttatccttacccccaagttcagccacattctgtccaacctcaaccccaacaaccgatgcaaatgcttccttatcagcagcctcatcctcaaatgcagcattcacaaccacaaattcaacaaccggttcagaagtatcctgttcctcaatctcaagttcatgcacaactgcaacctaatgctccaattcaacatcactctcagctccccgtgcctcctcaccagcctgtgactcctaatgtccagactccagtgcaaaatgcaatgtcgcattcagtgacagggcatcactcttatccccaacctctgcctcacccaaatatgcaacccagagtccctcaacatactatgcacatgcatcctcaaagtgggcatcaaccccaggcccaacatcctgtccagatgcagaatcagtttcctccacaaattccaacagcacgtcctaatcaatctcatgctatgtttcctaaccagcaacagccagctttgttgccttcttcagttcagggccaaactacccctcctttgcaacaacagtcactatatacccataatcaacaacctgggcaaatcaaccaacgtcctactttgccacctgttcaacaaatacctcagcagccgtttgcacaacaccaaatgcctatgccatctcatttacaaccacaaggtccagcacattcatttccaaagcatgcatatccacaggcacagggaaat

SEQ ID NO: 4523 - DNA, 979 bp, Glycine max
actagttattgacagagaaactgggaaaccaaaaggttatggattctgtgagtacaaggatgaagagacggctttgagtgctcgacgaaatcttcagggttatgaaattaatgggcggcaattacgcgttgattttgccgaaaatgataaagggaatgatagaaatcgagaacaggtatactgtcaaaacttcttcgaatactgacaagttagttattctcccaaatctttgctgtgtttactttaaagaaagtgcagtaaatcacctgaaaagaggcccaactccaaaccagccatactggcatgcaccgtttcaagtcatgaataattgggcatacattgtctctcattcaaatttactctttataattagatttaattttccaaactacaatatttgatcaatgtgaattgtgaacccaaaaattgatctcacattgatcaatatcttttacttgtttatagttacatttttgaccaaacaaattaagtcacccacattcactcaaaggtgttaggccttttcaaactaaagtaatgtgaatacattaaaattcatcattaatttcggagatgtcaaaggcatttaggacattgtaaagattttttcttcttatttcccctccaatttctgtgcgtttgtgtaggtcaaaatactggaatcttgtgctgaatatcagttttatttcagattaaattgattctttttctcttctggcacagggtcgtggcggtcctggaatgacaacaaatgttggtcagttctttatgctcatgctattcttatatgctttgataaattatcatagttcttacacatataatcactgcattatctttttcatcctgtgtttttcattttctccatttatgtattaaagaccatcagaaacaagttggtgtcccagctgtccatggggaagctgttcagcatcagcctattggtcttcatattgccataacagctgcaggcatgcaa

SEQ ID NO: 4524 - DNA, 1273 bp, Glycine max
cagcttgcatgcctgcagaagctccggcaagatacggcggtttgcggcgggcaccggcgcggggtttgcggtggcgctgatcaatcggaagctgaagggaacggtggtggctgcgtcgcacatagaagcagtgaaggatgggaaagaagaagaaccaatcgcttttggccccacttcgcttctttctaacttcggcgaaggttggaaactccaaactgttaccctcactgatctttcttcaggcaagttgaatacacaaacaaacccctctctctcgtctttcactatataatattcataaatgttacgttgcatataaaataaaatttaactagtttgaggaatgttaaaagcaaattatgatgtatgttatttcttggcttaaatatggttttagttcctcaaattaaaaatgagtttaatgcttgtgcattagcactgtcatttaatcacaaatcaccatcgattgaatataattattttataagtcaacaaatttaccataggtagtcatggaatgtctgtgtaaaaccttttacacttagtgcataactctttttctcattaaaaagagtttaatgtattttttagttcttcaaatttgaaaaacgcagtgtgcatcgccaaaaattagtcaggatgtgattaaaaaagcatttttatcttttattgtttgcagaagtggggaatggacaatttcaacagatggcaatgcagaaaccaggactagtaagtttattttctttcccacttttgcatacatgtcattttcttaagctaacttttaaatttacaattcaccatttatattttagttcacttaggataggaagtattggaaaactgtagtcgagagaattttgagaaactcaagctaagtgttcaagagactgaatgtgtattctcatcaatgataagctagtagagagaggtttatatatgaagagaaaatgagtgggttgttatcacactgttacaatagcaaagcctgagacagatgcaactgttatgactaatactaacatactaatagcaactgacctgtaccaacagatgaggctgccccatacaagaccagtatacactatacactaataatcctccctcaagcccagggaggatgagataattttgcttattaattccagaaactgagcttggcttttaatttcagaaagagagtaggagatagggtggtagaaacttgaagcttgggaagtagtgtttgaatccataagatttctgaggtagctgaagcaaggctgcaatattc

SEQ ID NO: 4525 - DNA, 936 bp, Glycine max
agcttgcatgcctgcagcacctaattgaaccggtgggcttgtgctggctctcctcattgagtacctttggtggtccaattttggttcggatatggcggcttaccattaagttttcagcatttgtcttgagtggtcttcgcttcttacaaaaggtataccatagagaatccttgttctcccctttgttgatctccatcttgggggctacacctccaggttgactggtctgccattgatcaatcttctttcccttttgtgcaattaaggcaaaactttctggggattgaggctccattatcacccccctacgtgcttcttctgcctggaaggcaaccatggtttcattgagtgaggataactcctatcctagcacctgaattcttacaggatcaaactcactatttagtcctgtcaagaacttatagattctgtccttctccttgtaacgtttaagtaaatcagcatcttctgtgcattttgcttcaaattgttcataatggtctaacaccagccaaagattttgcagattctgggcatactcactaacggatcggtctccttgtttggtagtcgcgatcttcatctttatttcataaatttgagcagcatcaccaaccttggaatagttttgtttacagctatcccacacatccttggcagtcttcatgaacatgcaagcatcgctcacctctgacaccatggaattccacagccacaacatctctactgcatctgtttcatcccatgcacttattgtctgtggattttggggcttctttcccagtaagatgattcaatttgcccttcccttttagaaaggtttggacaaagtgagaccatttgaggtagttttttccattgagacgaagaaggttggattgaatattttgtagctcaacggtgccggtattttctgcctgggcagggttattggct

SEQ ID NO: 4526 - DNA, 963 bp, Glycine max
aacttgcagctgaatctcacaaggaatccttcgaactcctgacacagttgccaaatttcaggtttcttgataagatgttgctatctgggaattttctcttgcttttttagctacttcattcacagagattcattttctggttgtttactgtttgcctttaggtgatgtccttttgtttggtcaattagttataatgtttaaaatgccattatctgctttatgtggcagagtgttcctgtgcaagctgggcaaactcctcctttgttgcagtattttggaacacttttaacaaggggaaagctgaatgcctttgaatcattagaattgtcacggttggttgtgaaccagaacaagaaaaatctgttggaaaattggttggcagaggacaagcttgaatgcagtgaggagctaggagatctcgttaaggttgggttgcattaaaattttgaaaaattcaatattattttgttatttataactttgcttgtactctatctttctaattgtctcccaaaaatataggggtactgattctcatctagcctgtttattgtgaaatgttgtattctattaatttttacaagcatgctcccttgtagactgtggacaatgatcttgctttaaaaatatatatcaaagccagagctactccaaaagttgttgctgcatttgctgagaggagggagtttgacaaaattctgatttactctaaacaggtgcctgcttacttatcaaagaatattgaagtttaatccatagaataatttagtgctattatggcatgcatagcattttgtcaccctgtataattataattgcatgtattgccctttcattttactgtaaacatttggtcctgaacattgtattacttatttgttgctataggttgggtacacacctgactacctcttccttctgcaaacaattctccggacagatcctcaggtgtgagagaaacct

SEQ ID NO: 4527 - DNA, 1251 bp, Glycine max
aaccccacagctcagaagacatattttctcaagaggtgcaaggggactgagtttcactgcacatccagaatggactactgtgtattcactgaaacttgaaacagcacaataatcataaacaggttccccttttactgagaagcgcgtcttctggtcactatgcattaaacccatcctttccaatcccaaaacgacaagtgttgctttttccagatgtgcactgcctgcatgatatgcattctccaatgaatactgttagcacatggtccccctctttgaattcagtcactccttgtcccacactctcaacaatgctgcaaaaatataccaaatattaaatatctactgagaagactacacctttttgcaatgatttagctaaagtaatgtccttgatgcaacaatgtatcacattcccatgcatagtgtaatacttcactctcagctgatcgttgtcactctaactcaacttggcatatcagtatttgatcaaattctcatactacccaattgggtaactcttaaaaatacaaaatttcttcttatgaaattcaacaaaaataacctaaggaacactagtgactcaatgttgtcttaatccaaacgtagaaataagagtagattaccctgatgcttcatggccaaatattcgaggaaatatggcctgcaaaaaagcacctggcgttaaacgcttaactacatccattcataaatttttaacagaaatcatgacaaagaaatattcattagtagactaatcgatcacaccaccagccatcggtagcttttaaaaaagaacaggaggcatactcttgagaacgcaacatttaattcaagatttatcagtaaaacaataatcaatcacattaaacatcaaatgttgataggcatgcattggctaatatgttattgaattacatctcatgagttgaattttaataaattctgtcaaatcaaaaattacttcaagtatgacttttaaatacacgattcaatgatgatgtaaaagatccttacaatgtcaatttattccaattcaatttgaagtttcacactccaaaagaaccatgcgaagttttatgaaacaaattttccattaaaggcaagataacaaccagacttacatgagattcccaagcggagagatcactgcgacagagagaagtggagacaaccttaatcctaatctccattggttgaggaggactcacttccacttcctctatcaccaatgcttccccagctccccat

SEQ ID NO: 4528 - DNA, 1159 bp, Glycine max
gttccccttgaacgctgactcagtgaatgcatctaccttcatgtcaactcgaaattgaataacacagtaataacaagcaaaataaaatcagacagatcaagctcaaacataccacaaagtatttcacaggtttctttgccatagtagaacacacacagcacagaacaacttgacagatcccaacgtgtgtctgtttggttttatttatattttgctaaaaaagttatttaagctgactcagtggagtccaatagctgataaaaaaaactgtgctttactagcctgagtaatatatatataagggtacatcatgattgtcttgtctatgatcaatcacagaacttggattgggtgcttgagaatagagatagagaattcaacgttggcgggctctggccgctgacaacatgttccacatgctaccaacacaaataggaaaaattctataaattagccattgtaagtacaaaagacacacacgacccaaaattttttggtgacgaggctatgataatagtgaggacagcaatacaaataaaataaaataaaataaaataaagacttaaatgataattaaatattataataatattgaacaaatttgaaattgagtagggacatatactcttatattgcccaatttttgtccatgttagtgattatgatgatgtacaatgggcatgcgttggagttggaaaatgggtcttacattggttgaaaataagaagtaaataggatacgagtaagggctgtacaagttgaaattggcttaggcattttggacaaagaaataaccccaagttcaatcccataacaaaaagactaataacttcaaaacattgcgggacttggattgggcctatttacaaaattcaatatattaacatgcatataatgctgtttctttcttcttgttttttcgatacttatattgttgtttctttctgaaatttacaacatagaaattcatttcataaagattgttgcgaagtttttcctcatcatgtgctcaatgtgcaacatagtccctaggcacggctagctgcaatgaaaagcgtttatcagtagtttctttttcttcgagggggaccggtggaagatccggtagctaaagcaatgattgaccaatttattaacccagcaaatgtattattatact

SEQ ID NO: 4529 - DNA, 1200 bp, Glycine max
agggtaaatatacgcaacttacccccacaagcagagagactgttttcaggattttaacccataacctccaagtcacaaggcaacaaccttaccattgcgccaagacttgccctcagttttctggttcattgagccttaaaaaaaaaaaacttcaaatttatactgtcactaggaacaccagcatctatgcactcaaaaaagtaaactaacagaaaaaacagatattcttcaaatctccaacaaatcccaggggcagacatgtatacaggcaaaagaagaaaccaccaaaaaattattgtggtgtcaagctctctcttcttgcagctacatagacacataatctgaatagattaatgcaatttaaatcaagaaaatttgttacaaagttaactacaaaaagtaagaacacataacaatgcacagggtcgtaaaccaaaggagttactacctacactcattacatgtatcaaacaaatcatatcaattcttacaactttcacaaaatcctttccatgcaaatcagcattttccatccgaatatcacaaaattgtcaccatgatcctgtgctgatttgggtaagtgcatgtttgattaaagtttacaaacataagtttgggttaaacttgagtttacaaagcatcccaggtcttgcttctctaaaactgaattttcagacaaaattttactctcaaacctacttttggagataaccaaacatgaccgagactaattttactcccaaacatacttttggagcacctcctaccagaaattcaaacataccctaaaataattttccaagaaagacagatttgaatgactttaataaatatctataaggaagcagaccactattaagcactgtattcatcaaactttccaaaaacctttttcttttatttatcttatttattattcttttacgtttctatttgggttgagtttcgaagtattttaattttatttagtttatgcagctaaaaatttgttgttaagaaagtctcattgtaaatccacaagactcaaactgttttcaaaaccatcttgactgatattggaatttatattctgagaatgtttatcactcatgggatggaactcatttagttcattaacctttaataattatcataagcaacaacaaaatttagattcacagcattaaaattggattagaactcacactgcaggacatgcaa

SEQ ID NO: 4530 - DNA, 1071 bp, Glycine max
gtgaaacttatctaaatgatgctttgaatgacaacattttactgtttatttttattgaatgcttcttgttcttcccatttctctttttcatttcttgtcattcaggtgaaggataggcataatggaaacctcctattggatgaagaaggtcatatcattcatatcgattttggcttcatgctttccaattcacctggtggtgttaactttgaaagtgcacctttcaaattaacacgtgaacttcttgaggtaaaacttagattatttgctttttgttatagtgcccatattcaaatgttcatttgattagatattagattccctctatacaatgatcacaagctcacaacaatctgattgtgctaggttatggattctgatgctgagggtgttccgagcgagttctttgattattttaaggtgctgatgaatactctttctgatcacagatgatagatgctattgatagctctaatttgacatgttgctttgtcctctgcatttcaggttttatgcattcaaggcttccttacttgccgcaagcatgctgagcgcatcattcttcttgttgagatgttgcaggtaatatgaatgttagctccctgtggttccatggtcatataatattgagtccacctgtgttctgtctggttgtgatttgtacttccagtttctcagaacaggacaataggtagcttacgttgtgctctctcaaacaaccttgcaaattttactgacggaaaatatctcattatacgatagaaacttgataccgttttagaaagaataagggatttctccctcgaatatagtgcctaatttgcagaacttcaagggtctgcaccccaatgcctaaaggctccaattatctcacaaatgagaattgacaagttattattctctttccgcctctcctcttatttattggcgatctttcttaattattttttctcagcccaacaaacaaatagataccagcaattaactaacaacctaacactctaattactaacagattgataactaataaccatctaaaattatatttaactttacatgctgcaggtcgac

SEQ ID NO: 4531 - DNA, 1053 bp, Glycine max
tgctttacgccaagacttgccatgcctgcagatgaagctgctctttgcctagctgtgatcgcaccattcaccgcgccaacaagcttgcaaccaaacacgcccgtttctctctccactaccccacctccaaagacttccctctttgtgatatatgccaagtactctcactccttcctactttcttctctcttccattttctaccaccatcttctcaaatgattcaaagtaattttttcaggaattcgatccatgagtctgtctatacgtacacgtgaaaaaatatctcttacaaaaagtttatctatttatatataaaaaaatatgtgttggaagaggtcactctcttatccatgtctccacgtctgtgtgtataaaaagcatctgttaaaaaacaatctcttgcatgaatctttttatttctagacattagtttttgagtctcggactcggttatatccttgattataaaaataataaaaaatatttgttaaaagaagtaatcatttatttatttaacaggagaggcgtgcatatctattttgccaagaagacagggcgttgttatgcagggaatgcgacgttcctatccacagagccaatgagcatacccaaaagcataacaggtttcttctcacgggtgtgaagctctctggtacttgtttagatcctgcttcgtcctccaccaattacaccaataataatagagtcactggctctgaaggaagaaacgacgctcgatctagaatgaacagacccagatcatcagtttccaatgaagaaaatgcaagtaattcttcttgcaaggttgaagacaacgtggctagtgacactggttcgatttcaactagcagcatttctgagtacttgattgaaacaatacccggttactgttttgaagacctccttgatgcttcgtttgcacctaatggtttctgtaaggtttgctttaaaccttgtatatatatatatatatatatatatatataatagctagtaacttgtttttcttctcaggttttatttaacaactttgaaccgtgtttgttgctgtt

SEQ ID NO: 4532 - DNA, 1190 bp, Glycine max
gatacgccagcttgctgcctgcgtcacatttgatggttagataagattcaatgtggttcgtagtttatactatcacaattcaaaacttataaagattccctaggacaagaagaattgaaatcgtgtctttctgcaaagttaatcacagtccattctactcttcagatcaagcatctttaataggttttgttctaaatcatctcatcaggttgagcccaacaagttaggcccaagccaatcgaggacttttgtctcccctagtaagagtacagccacatgatcatgggagcagagactcccacaacaaccctagaaagaaaaataatcagatatctcgctatgcactcacgttcccattatacaaactcccatgctgaagctcactcactcgagggtcaggacacctttgtaagtattcaccccttgtgcccattggagtttgggagcaaggagaatggaactcacgctaggtgtgacaaagaaagattagcaaatcaaatcctatgagctcaatccttgtggttaagaaaatttcacgtacaaaaatccaaattgtatatgtttaaatccttgttcggataactaaacattttttaagcataattatatattaatatattagaaaggaatgaattagggagcaagagtgatatttactgaggaaaaggtatagtagaatcacacctaagatgaattagacaagtgcaaagaagaccaatagaaatcttggttacaaagttcatcaaatgaacaatagcccaataattagaggcaggggcaaaccagtaaagactcttcaatagaaaccattaaaaaggatctagaattaaatggcctatttaaataattaaatggcctctagaatcaaatgaacacaacacaatggtggttgttattgttgtaattattattatttattattaacagttatgagttatgatgctatgcagatgcaatccaacctagaactgggttagagctggggttttaaataaagtgtgctcaacatcagtttacaaactcaaaagtagaagagaaaccttttgacgttttgcatttggggggcttggatcagaatcactctgtctgcgtgatgtcccgacatcagtttcaacctgcacacacatcggctggtcagcttcttttctttttatgggagaggtaattacaatactttttttttttttgct

SEQ ID NO: 4533 - DNA, 1063 bp, Glycine max
cagattcacagcggtggcaacagagtgggcattggcagagctcatcaacaatcccagggtgttgcaaaaggctcgtgaggaggtctacagtgttgtgggcaaagatagactcgttgacgaagttgacactcaaaaccttccttacattagggccattgtgaaggagacattccgaatgcacccaccactcccagtggtcaaaagaaagtgcacagaagagtgtgagattaatgggtatgtgatcccagagggagcattggttcttttcaatgtttggcaagtaggaagggaccccaaatactgggacagaccatcagaattccgtcccgagaggttcttagaaactggtgctgaaggggaagcagggcctcttgatcttaggggccagcatttccaactcctcccatttgggtctgggaggagaatgtgccctggtgtcaatttggctacttcaggaatggcaacacttcttgcatctcttatccaatgctttgacctgcaagtgctgggccctcaaggacaaatattgaaaggtgatgatgccaaagttagcatggaagagagagctggcctcacagttccaagggcacatagtctcgtttgtgttccacttgcaaggatcggcgttgcatctaaactcctttcttaattaagataatcatcatatacaatagtagtgtcttgccatcgcagttgctttttatgtattcataatcatcatttcaataaggtgtgactggtacttaatcaagtaattaaggttacatacatgcacatgtatcatctcccatttgtctttgtttcgtacgtaagacaatttttttttcccggccaaactcataatcataagagataaatcatctcataaactcataaaaattaactagttaacttgatatatatataaaacacaaaacaagtgtgtaatttacaaagatactaaatcagttcaaaaaccattctgtttgggaggtcatagctctatgatatgtaaatatcaccaaggtcattgtaaattggttaattagatgataaaagctgcaggcagcaagcttgcgtatca

SEQ ID NO: 4534 - DNA, 1167 bp, Glycine max
gaaacactaattgaaggttaactgcactgtaccaaatgtgcaaaagacaataaagtaaggcatgggcacctttgttagcatccttttcgcaagtatgtgataatgacgctgccatatccgttgtcctatcattgtagccactaatacactgtaaaatatcccaagtacagcaaagagtaccagaaaaaacaaaaccattatgaataataatggtagccctgcttcgtcctcagaacctctcatgcaagtgcaaccacagcattcagttccacaattctcacagcatgcattgcaatcagtcgacatataaggagtaccgtacatataaggagtaccatgcaaatgacgatcagcacaaactctgcaatggaaacaaacaatacaataccaaccttagtcactaccattgtggatcacagactttctactgacatatacttcaaaattcaaatataccatgaagcagcatactctctatatttagcatgtccaaggatgtattatataagagctacatttttatgttttttaaaaagctgaagttcataagtattccttagtgcaaattagggtctccaatataacggaaattatccaagcatagtttctggatcataaaatgtttttttaaaaaaagcaaaaagtaaatatatgatgattcaagaagttgttaagatttacgagtatacttgtgtgttttaacagtgtcaaaggctcatgaatatttaaaagcagagctattacccaggttgacagcaacaaagacatatttctcgacaaggctgacccaaatcactgcgaattcttggatcagaacaagtaataaagcacccagacaggccaagcaacaaaaaaaacaccagtgctcctacatttgacaaaaccaaaatgaaatcaacagagccagcatcatcctatgtatggataaaacaactgcgaataaaagaaattaagcaataccaaaatttaccaccactaccacccaacaaaaaaaaatagtaacagcaatacttgctataagcattttgatgactactgctcaagtccatagcaatttaccacatatatagtaaaagctcagctcactaccaaaaccccaaacaagacgaagccaatacttctcgtaaccatctatttggtaaaccaaataagcaagtgaagcaatga

SEQ ID NO: 4535 - DNA, 1138 bp, Glycine max
acaaactgttagtctataagaaataaatgaaatgttgctggacagataagataatgtagtattgattagcagattatattatatttataatcattatgaagagtcattaacaaagacagtaaataagcagatcatagcatgcattgtatgtctgtatgaattacaatataaatatgagcatcaataaaactagctacgtagtactgtactcactattaattccataaacactattccagtagttaatgctttcctcgtatcttttggtatttgtaacaggagccatgtacaactacagagagaatactaagaggtaagtattgtctagtacaacatctattgaattcagtaactaataagtttccaaacacatccaagccaattaacagaattaacacagattaaactttggcacgccattagtctgaaaaacaacctcagggaatttcactacaaactattaatgatagaaaataaatgtaccgttgcctttgaaggaagcattagacctcctggtttgagccagcgatctctggcagtaataacactttccagcatgttctacaagtaaaggcaagtcttcaaaccaataaaattatgaaagcaaatgtattctaaaaaatctaggaaacttaaggtcatttcgcctgaaataaaacaaaaaagggtcatctcattttctcgctttgccatatttttatgatcataatgacaaggagatgtctttctgttagttagccaatgaattcttcaagaggattctttgttcaatgttcaataggatttgagagtttcattgtattgatacttggttctactttgctttggacaataagatctaatttaaagtttgagaggtccttttcacttaaaagtttgtaaccacaggactgagttgcaggtttttctgaataattccgtttttcttcgtacttagcaacaacattttatttgtttcaattaattttaatatctggcttttaacccacttattttacaatcatgtgtttcaacgttgaactacaaaaaatatatatttactcaattgatcacaaaaatcctaatgagcaccttatgtagaagcatatagcccatccattctgaaattataacatcaacttgttccttatttcaacat

SEQ ID NO: 4536 - DNA, 1258 bp, Glycine max
ctcgagtacccggggttttcctctagagtcgacctgcaggatgttgtaatcgaagaaaaggttgatgttataatttcagaatggatgggctctatgcttttttttaggtgcttattataattcttgtggtcgattgagtaaatacatattttttatagttcaatgttgaaacacatgattgtaaaataagtggtggaaagccagatactgaactctggaggggtaaaactgatagtttaaatattcaaattaattgaaacaaaaaaatgttgtctctaagtcggaagaaaaaagaaattatttagaaaaacttgcagttcagttctgtgttacaaacttttaagtgaaaaggacttttcataaacttctaattggatcttattgtctaaagcaaactagaatcaagtatcaatgcaatgaaaccctcaaatcctattgaacattgaacaaacaatcctcttgaagaattcattgacaaactaacagaatgacaactccatgtcattatgatgataaaaatatggctcagcgagaaaatgacatgagcttttttttgttttttaggtgaaatgacctcaagtttcctagatttcttagaatacatttgctttcataatttatattggttttgaagacttgcctttacttgtagaacatgcttgcaagtgttattactgccagagatcgctggctcaatcctggaggtctaatgcttccttcaaaggcaacggtacatttatttcctatctttaatagtttgtagtgaaattccctttaaggttgttttttagactaaggcttgccaaagtttaatctcctcttacttctagtttgagttaattctgttaattggatttaacacgaagccttggcttggatgtgtttgggaacttatcagtttttagtgaaattcaatatatatgttgtaatagacaatagttacctctttgtattccctttgtagttgtagatggctccttttacaactacccaaagatacaaggaaagcattgactgccggaaccgtgtttatggaattaatagtgagtgcactactttgtagctagttttgttgatgtccatatttatattttacttcatacagacatacaatgtgcattctatgatctgcttatttactgtctttgttaatgactcttcataatgattataaatataatataatctgctaatcaatactacattatcttatctgtcctgcaacatttcatttgtttcttatagactaatagtttgt

SEQ ID NO: 4537 - DNA, 1026 bp, Glycine max
gacacattgaggtagtaaattttctcttggaaaaaggtaatagcctggtaactattgcaaaaagcaatgggaaaactgtgttgcattcttctgcaagaaatggctacatggaggttgtcaaggcccttgtgagcaaagaaccagaaattgcaatgagaattgataaaaaggggcagacagcactccatatggcagttaaaggacagaatcttgagttggtggatgagctcgtgaaattgaatccatctttggccaatatggtggataccaaggggaacactgcactgcatatagcaacccggaagggtcgtctacaggtaaaaaaactgctttccttttctgttttctttcttaagaaagtaactgataatgtattgttctatgtcaactgaacttgtgctttttattttagacattagattctagagttcctcatcatccaagactatgaacaacaaaatagatttctttattagctccagaatactaatatactatgtttctgtgatacttcagaaatggtctggttttactaacattgattaacagatagtaattaaaatttaaattggagattatttcaaaggtagatgcttgtctttcttgtgtcctggttagtataagagaaatgaactccaaagtttaaacttacttattcagcgcctgtggtggctgtgcactgtgtgtcactagtgtcatacatgtgagcataatcaattgatatggtaaactgagggggcaaaaatctaataacttgtacaaactgcttttttttgtttgttacttaagttttacgttgtttttaaattttaataccctcaacaatttgccctggtccttgcttaacttcttctgaattgattagcttcagctgtttgattatgttctgcaaccatagcaagtaaacttaatgcttttgcactaatcttgcaggttgttcagaagttactagattgcagagaaataaacacagatgttatcaacaaatctggagaaactgctttagatactgcaggcatgcaagct

SEQ ID NO: 4538 - DNA, 1239 bp, Glycine max
caaaatgattgatttgaaagaattgtccttggtcagtggaaaagctgcatggatggcttacctggtaagctttctatatggactacagttacgaaatttcacaaatcaatcatagaatgaatggatagcacaccacattggtgtgaggtaacctgactttgtttcctctgattgtgatgttatcattttattgaatgacagaatgctgcctttatcatgcaggatatctactgtttggatgccgatggtgctctttttgatgctgcattactttctgccgttgcttccttatctcattgtaagtagtgcatcttcagcataattctgtcatattatgaatatgttagaccccttattcagaatagcaagtcccacatttgaaaactgtacaccaggaaatttaggaacaaagagaagaaaaataaagcagctgatgatatatcagccaatgggattagatataatagtgttgttgcaattattatgtttatcttttagttgttattctgttctgttactttgtcagtttagtcttcgggaggttattatctcttgttatgtagcactggctaaggaggctacttttgggaagctcttggtcatctttatgaaaactattggattttttagtagaaacaaaggacactttgtccgcagattgatgtatatgggtttgccgggtattactctaaaccttgtattcatctttctataccgtaagagacaatagtgggtggtgactggtaggaccatcaaagagaaaacgtagtttgttctgttgagatgaaaaggctgcaaaccatgtggagatgatgttgtctctggcgaagatgagggggcagataaatcatttggacacatcaacattgtgcataggacacttcctgtgtcattactgtaaatcttgtgcattcatataaaataaagttattccttctaggataaggttcctaacagaatcattcaaaagatagacttttcttgtgcttaaagagaagttgtgtgttgctgttgatgttctcaatgtgatgcctttaaacacttgtgttttctgcattgacagtgcaaattcctgttgttgccatgaatgatgatggcaaaatagtactcgtgtctgaagaagatggacaaaagcgagaacaggagccagtcaataaggagaagaggaagcttacattaagaagcattccattctcattaacttgcatacttcacaagaattacatattggctgatcct

SEQ ID NO: 4539 - DNA, 1192 bp, Glycine max
atagacaaggaaggttcagagctctaagaagaaggatccggaagaactggagctgctggtggtggagggagaggagaggtagaaggagctgatgttgggggagctgaagtagatggtgcctcagatcctttggccctagatttgcgggttccccaaaaagtgaccgaagggtcatccaggttctagcaattctttttaatataagccaaattaatgattgggcttagggattcaaaggtcacagaatcatatgtgactcctcgggccttgcataaagcagtaataagggctggaaaacctagccttaaggagtcgtgttgtgctataagagagatctgacctaagatgagggatcccaagttcatatccatcttcatgatgagcccgtagattaacttagccctatccaaagtaatatctgaagtatgagatgtcagggctaagttagaaaaagatagaacactccaggtctgggccagagtagtaagattcttccttaaaatcttcagaggcagcccgtctgcattcagctcaaattcctctcccagggatacatagacgggctgcaagctcttgaggagtaggccttagattagcaaacctggagtaagcgggcaagctctccccttcctctatgaccaatggggtcttcaagaaggtgttgagggcgtcagcatcaaatttaattaggtgccctcacaccgtcacctgcttaggtgatttgtcttcagggtcatagaggttagcataaaattctttaataatagcaacatcaatgcttctctctaagaagttagtgagctacttatgccaattccacctctcaatttctctcctgaattcatcaaattctgtgatatacggcttcatattcctttctggaaggatcttccagcctagaatattgtctgcatatctgtcccaggcatcttgtgatgtgaattttgatttgtcatatagtgcctgggacactgaagctggtgccttccttttacgagaagccatatgcaaaacaaaagaatcaaatcacaagattagacaagaattattcaaattgaaaaatagaaaataaaactaaaattaaggttgggcgcttagcgcgacagatgcgcttagcgcgccttataaatttacttatgcgctaagcgcgatagacatgcgcttagtgtgtaacacaaaaaatatttttttt

SEQ ID NO: 4540 - DNA, 1063 bp, Glycine max
ggccaatcttgcctgctctgcagtacaaaaaataatactttctgtcaaacaacaaattatttcacctactgagtaatgaattttgaagctccagctattctatagagacactttaatatctttctattcattctcacacagcatcatcagatcttcaattaatttttttcaccttgaaaaaccatgcttgcagtgtagcaaaaaaacatttaatgcagatcttactaaatttcaagttttcaaccaattaacacaacaaaaaatacagataagatcatatcaaacttcagccttaggccagagaatgtacagtacttgaaattttggattgtttagtaaacttctgcacccatgaaccatttacagttctgcaagagaatcataaagtttgtaccataaaatattatttcattgagcaaggtggccaagaacaactaaaagatgacttaaaaaatccacagtaaacatacattctctagtatactactcctcaattagtatatctggatacaaagactccggttgacagatcactaatgatgaatcattaatgacaatggtaatttcagtacctaataaatagaactggggatgaccatgccaaacaattgaatcttatgattatcattctgacagcatcatctttgcttttccgcagcctgcacagagaaataagtcaagaaaacaggtacgatatcagtgacaggtatcaaaaaatgttgggaggcataggaacacagattatacagagaacagtttattcatcaaaactaaaggaaaaacattcagaactgatctctgccaagttcttaagcttagagaataactcattttaagttgttactctcctttgcacttatcagggtccaattatgcctttcttaggttcaattgaacttcattacaaaagaatggcaacaactaataaaactaaattagaaaagtagagatataggattttatccgtgagtagttccatcatccaaacatcataagtactagtgtttcagatttggactgatataggcttcaggtaataaaattgaagacatggcgtccattt

SEQ ID NO: 4541 - DNA, 1182 bp, Glycine max
aattaccatgtatacagtaaaaagaaatcagattcatactagaccttaatacctcaaagttccagttctttaccctatcagatgataaaggctccaacaaaatgttggacaaactttataaacataaattgacctttaatgaggatgaatttaaaaacacgtctgcaaaacactgtttagctcaccaggaattattcaagtgaaatttattttctgaagtgcatttgtacttcaaagttctaacttccaaatgattcatccttaatcattcattttatgcaaaagactcgtggcagatgccagtgaaattacaatggaggtaccaaaaatttatgttctggcttattggagccaagagtatataattcactttgcctgtcctagaactatcatccagaaatttcactaaattcatgttcattgtagcatgcccctagtgcaatagaaaactatagttatctatacctgtccaagactcttaagtctcaacacaaccttctctgcttctcgttcatgtctaaaaataggcaaaccatgactttaatgtcaaactgttaaatttttgtacccatcatttgtttaaatggattcactaaaattgtcgaggatgaaaatcatcttcactaatcatattctaatctaaaatttcaattagaatagtgaaatttcatataatatgacagacatttgttgtattatttgtattactgggcagaagactggataaaatatttgcacaaaaaataagatgatctgggaaaagacttaccacagacagtaggaggaagagtaccaaggcttaactcatcaaaatcaatcgctttgatctgatacttcccaatgtattcagcaaatatcggttgagtcgtgcttctaataatcttacaaattgcctatacataaaaacgaaacaccattgaagaattgtccaacaagagcacaaacacacccatatggaatcaccgaaattacaataccgtgtctaagaagggccacatatccaacaaaaacttgttcaaccaatcaacctgaataacatgcaaaaataatatcaataacacagtaacatcatcatcgtagtcatcataaaccttaaaaaaacaaaacaaaacgtttaattcacgaaactaactcgttcataatcaggcgtcttcacccagagaggaatctcgggcagaagtt

SEQ ID NO: 4542 - DNA, 1231 bp, Glycine max
tgtagagtcgacctgcagggcctgcgtttaggttcacgcaatggctccaattggttcgtaaacgcaccgcaaagtatcgttcttctggcttccctcaccgcacttccaccaccatgccttctagctcttggttagttacttactgctacttattaccattctctttcattgctgcttctgttaaacttgtagttgtagtgagaaaggcatttgttgctaatgctcataatttgtgtccagcatcagagaatcgttggagaattcaaaattggacctgcatcctgatcagacagaaattagcttgtgggagaggcttgggaaggctgcaatgttggacattgaatctggctccttttcctgggacatgctctcttcactgcaccacactgaacacagcagtagcaatgaacattccgaggatgagatgaacaaagctctcgaggttcatcgcattctacaattgttctgtacaagtacaagcattacttccatagcaatcagggttgatgttttagtgcaacttgtgtgtcatgaattgctaacgtaggtttcacatataagccaatgtgcagcctgtgtatgctatggatatcctttgcttttgcttagtcagattgggagagagtaaatgtggttgagcatgttggtaattgttagttttggaagttataaagaataatgatttcatgttggtatatcttttttactatatatttttacctatattgtttattcattctagtggtggtgaatatctatgtatgtggggtttctttggacaaacattttagtaattatgtattgtgttttctttgtaattccgtattagagaaagtaagtatacatcaaatgggtattttcttaatttatgtcgtaatatctcttcagttgtgtccacataggtaactgtaaattctggaggagttgtcttctttgcctttttcaatatctctggaaatgctgatgcttgcccaaaagaagcagcagctgttataaagatagcatcatcaagaatggcaacacagtctgaacgccttggctatgaatttgccaagtggatgggagtccaaactccacaggttgttcccttaggttttataacacaagcaccacatctgcaaacttaggctatttagactatacttctaccatattcattctcctctattaatttgaagatgcagggtagagtcattcacaatacctgtttagaatggcaacaaataaagga

SEQ ID NO: 4543 - DNA, 811 bp, Glycine max
  misc_feature (772)..(772): n is a, c, g, or t
cctgacttgctgcctgcacctcaattttctaagtggtttggttaaggtataagacaagaaatataatccatttggtttgatccagtactgattagatttaataaaacctcacctgaattagattggtctgatttgatctggttaaatttttttctactgttctcgtgatatgttaaattattaataattaattattgaataatatataatatgtttctataatattattttttactttgataaaataaatatataacaattaattaattattttcatattaattatggtatgatatgatttaatatttatatgttttagatatttttatctatgatcatttgatgattttttatttagtcttaaaaaataatagttttttaattatttaatgataatactttaaaaataatttataataataaatgattatataatatttataatttaattataataataaatttaaaatttaaaatataaaaatatgaattaatcatttgttagatattttatatttattttttaatttttttaaaatatattgagtcaaccgaattaataatttatcgaacttctaatattaatccaagtgtttcgactcggtaaatgatccgatcagttatcatagcgggtgcacggtataacataccctttgcatgcgcaagtgcgagaatcaaattaccaagactaacatgtcaactgaattgacaaacacaaaatattaataaaattagaaagaaaaaacacgttaaataaacgcaacatatttangatcaatcaaaacattagtttataaactcttaagtaaat

SEQ ID NO: 4544 - DNA, 1412 bp, Glycine max
gctacagaaattgcagcagcagcagcagcatcaacaacgactactttccacgtctaccccacttttgctgtctcagcttctacaacaacaaaatactcaccaacaaaaccagcaattaccgcagcccctgccgcctatatctcagcatcaacctcaacaactaggcaataacgcattctcaacagagaagcttctcaacagcaacaacttatcttcatctcttatgcaatcacagaagctttcaatgaaccagccccagaatacacagaaatcacttaccatcactagagctccctctacactaactgagggagatgccccatcatgctcaacctctccatctactaataactgccaggtgactcccccaaacctcctgaaaagaaatcagcaaataccagccacattaggggggggtttgatagttgagcccactagtaatctgatacaggagcttcacagtaagcctgacacacagatcaaacaggagttgctcaatgtaaaaggacctgaccagttgaagtataaagggacaattactgatccgctggaagcttcttcttccggaacatcttactgtcttgatcctggtaatgtccagcagaacttgccactttccaacttctgcatggaaagggatgtccaatcacacccaagaaacagtttgccatttgactctaatctggatggtctaacccctgatactatgcttctaagggggtatgactcccaaaaagatcttcaaaatttgttgtctaactatgctagtgctccaagggacattgaaactgagctgtcaaccgctgatatcagctcacagtcgtttggagtgccaaacatgcccttcaagccaggttgctcaagtgatgttggcatcaatgatactggggttttaaataataataatggtttgcggaccaaccaaactccacgaatgcgaacatataccaaggtttgtcattctttgacaactgcaaataaatctatttggtatatttactggttgcattgtgtgtgtgcgcctcgaagttaaatgaattatgagattatatggtgtattaaaatccaaacgatgtacaaattttgtaggttcaaaagcgtggctctgttggaagatgtattgatgttacccgttacaagggatatgacgaactccggcatgatttggctagaatgtttgggattgaagggcagctagaagatcctctaaggactgattggaaattagtatacgtggatcatgaaaatgacattcttcttgttggtgatgacccttgggagtaagtagctaagtcctaaataatttgtaagcctactatttctgcaattgtggtttgttttaattgacaaccaacttatgattccttgcagtgaatttgtcagctgtgtccagagcataaagatattgtcat

SEQ ID NO: 4545 - DNA, 831 bp, Glycine max
  misc_feature (805)..(805): n is a, c, g, or t
  misc_feature (808)..(808): n is a, c, g, or t
acacatttgaagatgagcaccgcttatcgtccacaaacggaggtgattaataggtgtcttgagacttttcttcgatgttttattgctgttcaacctaagtcttgggtgttgtggctaccttgggctgaatattggtacaacaccacatttcatgtatccacgggcactttgccttttgaaatggtttatggatgcaaacctccagtgctaactggcttttcaataggggagacaatggaggctgctcaacgggaactgttagatcacaacgagggtttacggtagctgaagcatcatctcctaagggctcagagcagaatgaagtctcaagctgatcgcaagaggactgaaaagaattttgagataggagaatgggtctttttgaagttaagacctcatgggcaacaaacagttaagacctcaacagataggagcaattgcttataagctgaaattaccggattctgctcgtattcacccggtatttcatgtgtcattattaaagaaagctattgccaactacagagttgaagaggagcttcccgcagatttgggcagtgacacaccacaggtttgtgaacctgctgctgttttggcagcagacaattattggtgcattggaaaggtaagccagtggaagaagcaaattgggaagaagagttcaattttcagtcaatttcctcttttcagacttgaggacaagtctgttcttgaagaaggggacatgttagaaccccagtgatggatactaggccaatagcccagcccactatatggagagtgtactccaggagaaagggagcanagnagtagtgctgaggtgtcagtgag

SEQ ID NO: 4546 - DNA, 828 bp, Glycine max
aatggagtttgaaattatgatttatttggggcactgtgtttttttccagttattatccattttgtattttgtatttgtatacttacaaatcagaaaaataatactcggtctgatggtgaataaaattgggatatataatagtgcattagggatttcagtagatatcctttagaagctgaaggaagtccaataatgcttagccatatgcatcccatttatttgttctttttttaatgtaccttttgtttgcttaattggcaatggttcgaaatgacttgggtggcattgttgatcatgcagtttagctaatactacttgtggtatgatgccgagggcagtatgctggttatagttgggggaaatgcaaaggtatcatgctggcagctgcactagtgcagttaacaacagtacaataggtggaccatctactagggatgcaggaagatctgattcatcttctttgccagctaacttctccgtaagttcaaggtaaagtagcttcctgtcactttccacttattgccactttcttcttatcaatgattgtgactatagcatatgtgataaaggaactacaaattccaaatattttggttgagatacacagtggtttgctttaatatattttctttttctgttatctaataatttgtgttaaatgattttttctttttttacttgattaacatccttttgaaatttgtgacactatgcccggagtggggtttcatttatttcttgagtgatctggattttcagttcttatgctttaattgcttaaaggtcctctgattacaccaatcaaaattctttccctttatttcttta

SEQ ID NO: 4547 - DNA, 814 bp, Glycine max
  misc_feature (662)..(662): n is a, c, g, or t
tcaacaacatcaatgtcatggcatatttattcaaattttctaaacattatatcagaggaataaaaccagtaacaagaaagttcattgcaagcttgaaccaaatgagtcttcaactttgagctaagaacaacatagatccataaatgttatattctatttattagacaattttatttgcattaaatatactacctgtaatttaactacacctccaaacagattcctcagtgtgtgatccccagatatgtcaaccctacatgattgaacagacaatcaattatatctaagtttctgggctaatggtgtgggccagtagaagtcatataaaacaaaacttacgcatctaggaaaaaccctgcatcactcaaacatttcactttggtagatgtaggaaacaagctccggaactcatcacaatgtattatagatgccagaccacccgcagagcatccggacaaaagggcctaatataaaatttttttaattagcatccatgcatattgaagatttacaatatagagagttagagacatggtaaacctggttggccttctgcattcccttgaacaataattcctgcattgcagcttgccatattttttgtcctcggaattgaagctgtgcagcctgaaacaattcacatgccaatataccctcaagtnccaaaaatgaaagatactttcatatgcaaccaactcgccagcactaatatataagaacaacctattcattagaaaagatatatactccagaccagccaagattcatgaaaacaaatatatatggttgattgatttcatcataataaatttta

SEQ ID NO: 4548 - DNA, 812 bp, Glycine max
gtatgcctgcagggaggaggatggtgtaataccatcagaagttgtgtctttagaaaaactactcgtcgtggttcctcaaaatacatggaaaaacaactagcattcacagggatattgagcaataaagctgaagaaaaccctggtttttctctttaccttacgcatgcttgctttaattacttttggttctggagattacaagatatgcttactcaaatcttgtgtgttctcattttttgcatatattttcttgtgtgcacagatttctttaactggaacagagttatagtacgttactgtgatggggcatctttcagtggagatagtcaaaatgaggttagtgagagtatgacagtataatagtatacattttttccccttttatctatatagttattggtgcattcagaaaattaggcagtcacttgaagtaaagaagcagtgttttgctatttattttacatgatgtcaaacgcatcaatggcaaagaagcagagttttgtttatctgtgggagcggagagagttaaaattacggtcctagtattactccattctcctactcatatgccatgcatctcttgcaggcaacttttgtgacacaatgattcatagtttcataatgtatttgctttttatgacagaaagtagacatatttataccagtgtatgtctattttttcaaatatagacctttttcttaagcatgaatgaaacatgtaaaacttgacatttgcacccgaaactatctgggcttctaaattatgatgatgaaatcaatcaacatatatattggttctaatgaatcttggc

SEQ ID NO: 4549 - DNA, 751 bp, Glycine max
  misc_feature (744)..(744): n is a, c, g, or t
acaaacatatcatttatcacttttacattcgtttggtccattatttcatatgacaaacagtaaacatacaatttctgaaaatttaggcctatagatgttctatactttacaatacttggtagctattcatatgtgtatatattgtctacatcactggccaataagatgttctcaacaactatttttcatttgttgcagggttaacgtacagagtgattgatcatatgttgatttggtaggtgtatacatttttacaagtgttcgttattttggacttgctgaattttaaaggagactctactgaaatttctataaatttgaaagtacagtctggaaatcattttgccaagtatgtttgtgatgcttaagcttgcctggctaaaatgtgtttaagttggtataacttgtaacagctcagttttggggccataacacattgtcaagaaagggagttgtgagaggaaatgggagttaacaatcaatgactagagtcaagaaataagcaaatacctcccttgaattttgactagattcatgaaaagaatgataaaaatttataccttcttaggtattcgggtaagcgccgatgactcatccattgctcaacatcacggcttctaagttgcatttctagcctcctgtggagaaagaagaaaataatcaagtgtgttacaacaccgaacacattaccacttgaccatcaaagtttgcttaaaactagcagtattagataaattctacctncgtccaa

SEQ ID NO: 4550 - DNA, 1425 bp, Glycine max
agttttctattctctctagtgaatagcatggattattgcttggacatttgacattatgtttcatatgtaaaatatggaaatatatagatttgtactttttgcagagaatagataagagtagtttaatcatgtaaaaagagacacaacaaattcagttttatactcactcgttagatggatcattgcttaaatatttaacattacactggaaaactgcatttagtccaaagtaggagcaagcacaaagaaacatagacatttcaaattaaataatcaaagaactgtgtttcatgggtgtatttccattaagcaatacctctcccaaaaactccacaacaaaatcatcttcagcaaagccttcttccttgttgcaaacaacaccaagcccctgcatgatccatcccaaacagatagtatcagaaccacgaaaaataacagttcaaagacagaaaacaatcagagatgatacactagaaaactataggaagataactgttaaattgtagttaactgacacaaaaagcatataccttcctataagctacatatttgtcatctggacgactgtctatggcctttagaataccttgacacattttaaccattctcacatcacaatcctcctcagcgaactttttaatatcttcaataacagaccgcaacgggtagctcattggagtacttccagctccagtaaaattcctaacttgcttattcaatgttcgaaggagtgtgtcttctataaacaaatgcttctcctgcaaagaccaatctaactcctgtggcatagaatcaagcaaaagattgtgcgtataaggatcaattccataaacttcttgctcgataacctcatttcctagctgctttctaggtttgtaatcttttacttcaggaagttccatatctgactcgtcagtgccattcttttgtgcactcagcttctcagcatagtcatcaggtaatgaaaccctcatcttccttcgcacatcctcctcatcagctacaatgcaatattggtcaatgacttcatattttctagtaactggaggaaccagacttgcttttgtcatgcgagcaccccactctcgatcatcagttataaaacccaactcttcctcagacgtaaagtatccatcccctcttgactccctacttagactttctgaatgtacttctcggtcactttcagagtcagaggttgtagtatcactgtcactcttcccatcttcataagacttatcaagatcatcatcagatgtttcactctctgagtccatagatttcttgttcaactttaataagcgcctcctaatttctctatcagaggtatattccacattatccaaaccaccatgagttccattgctcctatacttcctttcattcaccaatctattcttcttatactttgagaaagtagagcag

SEQ ID NO: 4551 - DNA, 827 bp, Glycine max
  misc_feature (761)..(761): n is a, c, g, or t
  misc_feature (782)..(782): n is a, c, g, or t
tgcctgcagctttttagaatgattaacctcattcaaatgaaaactgattcaatacaatatgtggggccatgcatatttctgctcgtctcatcttttgaatttttttaatggaaattatatgttcatgtttggataattccctttccctttctgaatatttattcccttctcttagtttaattccgaagtattttcctttttgttttggagaaaaatcactaatctttagaattggttatttatgaagtttcttggaaattcttctaattgattacatcagttgttcattttttttctcataaaaaagaaaataagcagagagatgaattgtgttgacttggtatgagagtcaagttgttgataatacacggtagaaggagaagaaagaagttgactaatgttaacagtgcgctgactctaaagagtgcctaatttctttaagacaaaaaattgtccttatattctggttgaatatttcagctattgctttctatctcttcaattcattgtatgcaagttgaaagttgatgatatgataacactgatgacaccgtgatttttccacgcagacagcagattatgtgaaaccagaagagagaaccttgagaagtcaggactatatctgtttccttggcatcagtatcaattaacagctttctctaggctactattgtccattgttgtgcttctacatataatctgttggaagagatcagttgaagtactacaacacagttgagtcccggcaattctatatgcangcatcagagcacatagaattncagttgtactatcaaccattacacaatggagcgtctgcttgcgca

SEQ ID NO: 4552 - DNA, 741 bp, Glycine max
gttccttccaaattccaaacccaccatgtaagcatcgcatcgcatctacccagatctcatcatcttctttctttttcttttctaattctttttaacaaatttaatctcattccattaaacttttttttttgaattcccaattcgattaccctttgatttgcgaatttactgaaaataataatgggtggttcctgcacttcctgctgaaagttcgaaccctaaacgtcgacgtttttgcctaatttccatatgtagttcatattcatgcgatggatctgaattttctgtttcatatgtgagtatatgtcagcatatgctgcaaaagttgttagtctctttcaatattcaacccccaaaatagattctttgaacatggaattaagtttatgacatttttttaatctcttgaatattatcactgtttagattgttatttaaaattctgggtttgtgatcttttcagaatatctagcttcttgtgaaggctgttagtttgattatagaagttggtatcgataatttgctgtgatgggtggccaaaggagtggttatggtaagcgtccccactctcaatctgaccatgataatgggccaaataaaaggaggaatcatggtgatgatagagagcagtttgtgattgattcggaggataccgtgtatcgttatgtggtgcccgggtcgaaagattggcagtgttattggtaggggaggtgagattgtaagccactgagggtggagact

SEQ ID NO: 4553 - DNA, 1220 bp, Glycine max
tctctctcgaatttttatgccgcgggatcgggctttgtggttgtatcactaatgatgccaactgaactttaacaaatttgattttggatgatcttgatttgttttaattgagtgaatagtaattcatatttatctcaaccaaatttgtaatgaaacttggtgcaaatgtgcaatcaaagttgcgactactaaagtcaacatggttttgcgattttacggttctgataaaaaaaaaaacatttgagggatgtttcaaacgaaaaatgccaaacaaacaacactaatgcacgttttggtagcattgagagaattactgtcggatagaataaataaataaataaaaatacgtgaaaaatataatagaaatggaaaaatgtttacaggaaaaaaatagaaaagagacagttaaaagtaaaaaatcatacgctaagctctttagttcccaacaccgaacagtgttttactacttatccactttcactaagctcagacagcttattaccaattcttttctttccaagtcaagttaattttcctgttcactaggccaaactaaacgcagcttcgtacttcccaattcaggcgtttcaagttcattgtgagtgttgttctggttcaaacacactgataataataaacttaaacacaaaaatcgcaaataaatcacatccattcccagaatgaaacgacttgcaaaaaacatacgaggggtacgttttgcacggttcaaaaagagatattcaaaacgaaaatctggtaaaaattgcgagcatataaacataagaaatcaacttttgacatggacaattctgaaaacatgacagaggtcgcaaacaacaggtcctaaaccaccaaaatagaagcataatgatgatatcacttcacagtttgaataatggagaactatatcacacaggagtaaaaacaaaaaggaacgaacaatactggttcagggtaatgtaacgaagcatataccctttttactcgaaacaattacattgataataaaaccttcatttatgaatagtcctctccttcctcatcatcttccgctccttcagccccaacctcctcatagtccttctcaagagcagcaagatcctcacgagcttcagagaactctccttcttccataccctcaccaacataccagtgaacaaaggccctcttggcatacatcagatcaaatttgtggtcaatgcgagagaacacctcagcaa

SEQ ID NO: 4554 - DNA, 815 bp, Glycine max
caaccttctgcctgcacatcgcttgttttttttttttttcctttcttcccttatgggctcacggttgtcacagaacccattaccgtgggcccaataaactgttccttatatttgggctcaagagcaaacttctctccatttcacaagtattaacacttttccttaacatatgggttaactaactaaaaaaataattcttatcgagagacataaaattatattagtcatgattttttttgtattttttttatatttttcacaataaatgcttttatttatttatttaataaatatattattaacaaaatcatataaaattacatctccttttcggctttcgaacagtcaaggattattataatattaccatttcattataatatttaaaaagataaaatagtaattataaaatatttaggcaaaatataattttgattcatttatttttttaatatataattttggtctatcattttaaaataagtacatttagtctttttattttataaaaaataattttgaaatgaggacatcaaaatgaaaaattaacaaagagaagaagataaaaattatattttaacggaatatttacttatgaatcgaaattagaaaaccataattggttatcaagctgttatgctcacaaaagaagtgtgtagatgttgtttcatttcagtggcgttttcacaccatttttgcgacgaaagatatagcgaaggtctcacaaattttaaacatctcgtgtctcttttagttcgaatataataaacacacgtggtgacacaaaataattaacgatgttgttttttttttac

SEQ ID NO: 4555 - DNA, 748 bp, Glycine max
atattcgccacgtggcaaagagtgataaatcgtgcggctctgatacacttcgcaaggtgaagtctcgcaccaccacgttcaagcgccgagccgcaaagtccagagtcgagtcagttgtggctgagttggctgaaagcgagttagatggtcatggttcgatgagtcatgactcaggatccggggtgactcggatgagtgagaacaaaatcgttggaggggaagccgatagcggctccgtgcagagtgtggggccggcacgagccgatggtggagaaatggaacttcaattaacattggggtggggtccactgaagagacaatgatgacgccacgtgtagggcttgatctctctggctagtaggggtggtgttagctagtggtgaaatatggttttttttatcttcaccccgtttagttatatgataatatttttgaatttttcacatatacatcgtgaaaattgtttgtaggagcattttttttatattataaattacaaaagaaaacaattaattaagcttttccaattcaaccaaacttatatggctgcaaactaaaaggtaataactcagactatagttgatttgatgaaaatgaaatcaaacgaaatcatcgttccccatgtgatgtttagtatggttaaaaatggaataaccgttctattgttttcaacgtttgatgcattgaaatgaaagtaagaatgaaaaataataaaaatattggcataataataacacacctcatacat

SEQ ID NO: 4556 - DNA, 824 bp, Glycine max
tatcattagctccggaattgttaactcttgataacaagttttctgtacttacaggtgcagccctcttgctgtcaatgctgctcaaagttatctcttcccttggtcccagttgagtatttatcagtttttcctgaataaaaagcaatcaagtattcaatatcacagaatacctatgaaatgtcacagtataaaggaatattatgggaacagtaccctcaatgcagaattttccatcctcatctgctcagaaccttcagtcagtcgagttatttctgacttcagagacacattctcagcagttaacatctcaacttttcgtgccaattcttcagtctcggcctaaacagaggaaatatgaatattagttattaactttcctcttgtcagaacaatccttttcctttttagttattttattttattttttgaggctacatatgtgtacatgcaacaagtgaataaacatgtgatagtaataaagaaactaaacaatttgtcttttatcagacaagacacgatggaaggtttgcaagtcaacaaactaaatttatacctgcttcctcagcctggaccttctagcagattcacggttagattgttttctcctctcccgtttcagctcacgctcattctaaggaattaaaaatacacacaggaattaatttactgtcagtaaaagatggacggtattgcataattgttctaatgtgtttcacaagcatctcttatgtactagacatgatccgagacattagaacaaccattatacctgtaaccaagtttcattacgcacactgcacaaggttgtgcggcacttgtggaat

SEQ ID NO: 4557 - DNA, 1460 bp, Glycine max
tggttcagggtagattcaatggtccatctcaatcaacgttaccaaacagtttacatttttctcttaacatttcaaccaaaaagattaaaaaaaaaaatccttcaaaaatataaaaaattaaaataaaactttttaaaatttaatataaaaaaattaatgatatactcatttgtattaactaaaaagttaaattgaagtttaaaaaaattaaaaaaatttaaattaccttattaaatcacaattattcgatagaattaattctttaaataactaaaaaataaatgacatttaaaagaataataaaaaaattaaatatatattttgagaataaaaatagattaaaatataaaaacattaaaaatgaactgaaatgattttgtggagcaaaacaaccaaaagtatataacatttaccaaaaacgaaaacaaacgcaggcttttattttgtagcggactgtagtaacttagttacttactggtatgcaatgcatggccccctgagaagaaatgcaacattgctcgccacaaatggcatcatcagccgccatttcttccgatcagaacccgaaagctatgctgaactcatcgatatgtacgctcgcgatcgagcgttgcacgctggcaagaagcttcacgcgcacctagtcaccaacggtttcgctcgtttcaacgtcgttgcttccaacctcgtatctttctacacatgctgtggccaactctccccacgcgcggaaactgttcgacaaaattcccaccacaaatgttcgccgctggattgctctcattggctcctgcgctcgctgcggcttctacgatcacgctctcgccgtgttctctgagatgcaagccgttcaagggcttacgcccaactacgtattcgtcatccccagcgttctcaaagcttgcggccacgtcggggatcgaattacaggagagaaaatacatggcttcattttgaagtgttcgttcgaacttgattcgtttgtgtccagttctttgattgttatgtactccaagtgtgcgaaagttgaggatgcgcgcaaggtgtttgatgggatgactgtcaaagacactgtggctctaaatgctgttgttgctgggtatgttcaacagggtgctgcaaacgaggcactgggtttggtggaaagtatgaagttgatgggtttgaagccaaatgtggtaacttggaactctttgatatctgggttttcacagaagggtgaccaaggaagggtgtctgagatttttaggttgatgattgcagatggagtggagcctgatgtggtatcatggacttctgttatatctggttttgtgcagaactttcgtaataaggaagcatttgacacgtttaagcaaatgttgagtcatgggttccacccaacttcagctactataagcgccctgttgcctgcttgtgctactgcaggtcgatctagaggttcccgggtacgagtccga

SEQ ID NO: 4558 - DNA, 850 bp, Glycine max
  misc_feature (652)..(652): n is a, c, g, or t
  misc_feature (669)..(669): n is a, c, g, or t
  misc_feature (763)..(763): n is a, c, g, or t
caattacatatctggggcctcactagagtacatagcagaattcaccaaaaaaaaaaactagcatacatagcagattttcttttttttcttgctatatagctctatgtaaactacaagttaccttagtcattcatcattaaattcttttccctagtgagcagaaagaacaattcattggaacaagaactaatgaccaattgaccaagatagttctccaaggaacactacatctacaactattttatatttttatatacatataaaaaacagcctgatgtgcagggactaaaatccattatcactttgaaagatcagtgaggtaaccattgttatatagtgaaaagttatataatgttatatgcaaggaaatataaaaaatatgtaaacaaagctaaaaactttctctgacaggaaaccgttccaaagatctaagaaccacctttagccagtgcttttgtttctggaacagcatctccaatggcaaggttgatacgagatatgaaactggaacctatagccatcatagtctcacttagtagccttgggacaagagttttatagtcatcagggaaagcaatcatacacctgcaaggcaacagctcaaatgcttttattatgctacttcaatatgcaaatttgattagtatcattntgtttcagctgattttncagtaggccgaagcactaaattttgagtacagcattattggcaatgtgaaccactttgcatggaaagaagaatctgaaatcaactggtgacagntaatacaggacacagatatgataaccatcaaatgagtaaaattatattattatattgttagtagggagtgctttaactaaacattaa

SEQ ID NO: 4559 - DNA, 814 bp, Glycine max
  misc_feature (709)..(709): n is a, c, g, or t
  misc_feature (753)..(753): n is a, c, g, or t
  misc_feature (799)..(799): n is a, c, g, or t
gttattttgtgaggtatatcctctttccttgtgtgtgttaggagcaggaagagtttgtggttactgcaaatcatattaatggttctttttacttgtttattttgttaattttaagaatgatgcaatttgattctttttgtccaaaatttgattggattgagggatcatattggatttttttcatcattaacagcaaaataaactcactgtttcaatttatgtatgagagaatgttgaggaaaagtacttttccttggcagagctagcttatgtacttaaactgaactttatctttttttatccaggacaaatcgaaatgcagaatgggatacttgtattccagtacctgattttgagtggaaacagattgctgagccggttatgcagttatatatggaaacaactgatggttcaaacatagaggccaaagaaagtgctctagtttggaattacgagtatgcagaccgagactttggttcatgccaagctaaggagctttttgatcatctggaaagtgttcttgccaatgagcctgtttctgttaaaagtagtccaaacattgttgaagtgaaacctcaggtcagtaaaaaaaaaaattccacttttagtcatttttaggttactcatatttataattgaaaaagtttatattttatatacatcttatagttgtgactttgtgtggcctctttaatagaaagatctttgnatttggacttcaagtgatttaattgtagtggtgctcataactgngcccaaacatgttttgacaccctgttatgttccatgtttgcatagntgactgctgtttgta

SEQ ID NO: 4560 - DNA, 848 bp, Glycine max
agaattcatgagcctcgtcaatgccaacaagagatgttacttgatacagtacattcactgattcacaatcctagcattcattcattcccaatcaaaaatcactttatcatacatcaaaatggcccaaaccaatagtcaagaaaagaaacaataaatacagtaccccatgtaattcatctactttcaaaacaacctattgatagttgcaacatagttgggatatcaataaatgaaggcaagtcagccagaaaataaaatagatcacgaaatctaacacaagatagatatcccagtatagtatagaaaaatagtactacattgtagccaaattgtgtgtgtgtgtgtgtttgcactctacacattaaaaagaaccttaatgagaagctggttgcaaagaagttctagtagagtgctcagaagcattggcaaggccttgcaacattctcaaaatctcacttgtgtcttccaaataatactttgccttgctaggtttctggccaacagtgcatggaaacacttcagcaactggagatagggttgcctttgcattcatgattaccccaaacatgtcctcgtctgatctgtcatctccaatgcatagaacaaaatctggaaacactcccttttgttgcattgttaagagaagacgttctgctacaatacccttactcacaccctgcaccaaaagttgaacaaccagaggagataatcaacccaaccacatttcatgaccaaatattagaattaaattcctgtgatctacacaagttctttagaaggaaatccatccaaatgcactccaattgttttgaacagaatattatggaacaaacagcagtcaactatgc

SEQ ID NO: 4561 - DNA, 1156 bp, Glycine max
agtgcctatccatgatagggattcccaccataattgctgtgttttgctgcattcaaagaaaagatgagatgcagtttcctccttaataccgcagaaaggacacaggctgtcatttatatcaatttgccttttccgcatattagacttagtcggtaatctatctctaattaacctcccagcaaaaattgatgctttagcctgggatcttcagcttccataagtccttgaatatatcatccatgtttccctcctctgagttcccttgcagcagaatgtaggcactcttagaagaatagtatccattggattcaggtttccatacccagctgtctgctgcatgttgttggagtgcagtgtgtgatatatcttccaaaaaacctacagccgaggctaccctcattgtcaaataggggccttctccaagaaaggttccattcccatgctgaatctgtgaaactccccatttgcagaattaatttttgttgctgacgggatatctgaaatagcctagggtatttttgcattagtggttgaccgcttccagtccagcaatcctcccagaaaacgaattttatccccgttgcccaccctccatactgttccctgttgaagtacattattgaattgttggtcatgggtcaccgccatcaaatcctgccaccacactgactcattattaacccttttagcatccaccagtgatctccacccaccatacttagaaaccaatattctggcccacaactccttgctttggtgaaacaaatcccatctctacttcccgagaagagctttgttgaaggcccttatgtcttttatacctaagccccctttatgttttgggaggcaaatagtttcccatttgacccacactattttcctttgctccgaccctcctccccataagaagctgcgctggattccaatgagcttatctgctacttttctgggcaacctgaaaaaggatagaaaataaatggggatcgatgataggatggactgaataagggtcactctccccccaaaggataaatggcgttgtttccatctagctagcttcctctcacactttctaattatcggatcccacagctcactacgccttgggtttgccccaatggggatacccaaatatttaaaaggtagggagagaatt

SEQ ID NO: 4562 - DNA, 802 bp, Glycine max
  misc_feature (753)..(753): n is a, c, g, or t
agataaggaatgacttagtttgcgagttttctgataaagcctgaccgaggaaagctactggatggtcttcatgtagcaaaacagtcctgagccctttattcaatgcatctatatgtagaataaaatgttttgagaaatatggtattgtgaaaaacagatatgtagtcatttctgccctgggatgaatccataaattatttaatgggtgctgaatacatcatagactattagttatactttgagaacaaaataaaaggtacgtaatgaaatttatttgttataatataacaactacaatattgtttaaagaaagttaaatatcatataacaatgaaatactattctagaagtggtggggatcatacatatgctgttgaaaaattactttgtaagctactgaacattgactgctatagtttagcaaccaatctcttgcactttctcattcaaaatatagttgtggccccagagttgtagacaaaaaagacatggtggaagctttagtgacaggaaatgacctctgtgcttttgtgcaatcttcaatagagacaataatcttgtgtagttctcaaacttctttgagcaggacacaaagtcacagaggtgaaacttctttaagaagctgtagctgatgaatccaaaatttcattactcgaacaagtttcataaatgagctgctgggctttgtaaacagaagcatgctctctacttgtttaacccaattcataagaagagggggccaacatgaactgngaaggaggggggtttccaatacccaaaaatattacatatagcaattgta

SEQ ID NO: 4563 - DNA, 1362 bp, Glycine max
atattcctagccttttacccttttttaatttttattttatccttgtactttcggtaacattctttttgagttcaaaacaaaaggccaaatataaagcagatcctaattaattgatttaattgatatggttgatggcgtggctcaaaattcagctccctctaacatgacccaaacaataataaaattataaaacggatggacgttaacgtgtcagttgaaaattgtctcaatctagctggtaaaaattgaaaaggaggacacttatattatatataataggttaaaatatgtttgtaatttttaataaatatatgaattttatatttattttttaatatatttctttttcataaaacaataattttatttttagtttgtgaaacttttttttaattcctataaattaattttttttctttatttcttgataaaaaaaattcatttattattagtttcctttgaaaaagactaataataaatgaaaaatatatcaagaaacaaatattgagttcttacattaaaaagaaaatgaaaatttcaagacttcaaatattttcattcgctattcaaacctttatattttaactcccttaaccaagataatgagctagtgccttaaaaaaaatggcgcagtgtctaattgtaacttcctctgtgcaaatatctggtgtatatctggacttctgcactacggcactatgcaatatccacacatcatataggcaaatagcaattaactaatacggcggaaggagagggaaatactaaacatattagtattagtattatgggtttaattaatgaagtcgctttcagatttggagtttatttgctgaatacttttactgattatttccatttcatatatttgatttttcttcttttattgaaattacaatatgtatatgtacttcagtactgctcaaaattttctacaagatcttcatatgatcaaaggccgaaacatgccactggtggacctggaatgcaagctgttttcttagtttcggggcaaggatcatgtggtactggcgtgttcttaccccaaaaagcaggcacaaaatcaatcaggaaaccaggttaattaactttgcacttttgtatttcctagtaatgagatgtatgtttgtgacagtatgactttttttattatatatccatatgtagtaataatttaatgattagatcgatcaaattcatatgttatttaaagttattttttttagaactgttatttaaagttattgaaatatattggtgtgagttacattgatatcattttaaccttaggattactttgcagcgtgcgctcctgtccttcttccagctcgagtagttcaagctctaaattttaaagtgcac

SEQ ID NO: 4564 - DNA, 716 bp, Glycine max
atcctctaggatcgacctgcagaacttgggcctctgaaaataatttacctgctcggcatgaaatgtcgttgtagtagtcttttctatttcttataaccgtaaagtgaagaatcgtcttttgctttgcagccactttggctatgataattaactactgcttattggttgaaacttgggttggcgttgtgtgtttgtcctgcttgctttgcgcagcgacttggactgtgtattgctgtttatttcatagcaggttaatctgtttcagatttaggaacattccaaggggaaaatttcctctctaatactcctccgtctatcaaaactcttttaattaatttgtatttcttaaaaaaataattattacattaaatttattaattatttatattaataatttaaatttatccttttattctctttgttcacttagttatttcttattaatatttagagaaaaaaatagcaaaataaggttatgtagagaataaaataattaatgtatctataaattataattttttatataaaaaatgataaacaattttttaaaaaaagtcttataattaaaaatgaacgaaatactactaaaggaacgatttgggagaggaggaaaaatgaaaaagaaaataaattgaaataaattttttaaatttaaagtagaatataaatgtgtgcaaattttacattattttactgctcatttctcttcttttaga

SEQ ID NO: 4565 - DNA, 1294 bp, Glycine max
atcctctaggatcgacctgcagtgcatctcatgttttcgtagcggatccccaaaatctaggctgcttatgtatagtaggccagtgtcagcaacatcagtaccatacattgtgattggtgcagatgcattagttgtgtcataaacatttacaacaatggtttgtttactggcaagttggtgcagaagcttgtccaccagtgatggaacatcataagacgcacccagatacctgccaataaataggtaacaacactcacataacactttgtaattgttttccttttaggggaggtggatcagagcacaaatgaaatgcatattttaaccagtagatagttaaatgtaggattaccctacagtagcttcggtacgctgctccggtgtagcatctaaaggaagattagtgttatagacagcaaatgtaagtacaacacccaggtgattggactttagtagtttaaaaggggatgtcagaaccccctttccagacgcccttgctctcaaaatattctcatggtcctcctgtgcaacaatgcaacaaaatattttcttttaaccagacagataatgagaaatttaacaaataattcaatagataatagtaactcctagtcttatttcttttaaccagtgctcagagtcattttattgatgttcatgagtaaaactcttgtatgtagttgattctgtttaccccacatttaactttcacattttcactgttcaaagtaaattatatactgtttagtgatctccagttctaatattccactccatgtatacaaaagctccaagcatctaatgctatgacctaaaccttgcataaagaaaatacaaagaaaaaaaagtctttctaactgatgacttcacactctagttttcttatacatacttgtgcagaataaatatggtaagaacattgacaggaatgtaaaatttgcagtttaagccattgccccacaatttgcttagaaaaagtaaatcatgttagggtgacagcaagctaagcaagacacaccttccctgacatcatgtcaatagatacaatatgggaaactgtttcttgagcaaatatcactggtgcatattcatcttgaatgggtgctggatccaaattttcaggaatacaatcttggactaatgcctcattctcagtttccattttcttaattgtccacccatgctgcttctcaaaatgcatcctatcagagtggagaactttcaaagcataagcaacaccactagtaagtggtctttcaaatgctgtactctctgtatattctccaaaaatttt

SEQ ID NO: 4566 - DNA, 789 bp, Glycine max
ttaaacctatagtccaatatgcaagctcacctcgtagacgcaagaccaaaaataattagacccatttgcttacaaggttagcaggccgaacttaaatagtatatagatatccaagtactttggaatttcaacacttacgagtatataattaaaattcatcataaataaatatttttttaatatctaatacaacatactatgatataattactttctatattttataagtaaaatatttattttgatataattaaaattgataataaataaatatttttttagtatataaattgtactataattaaaattcatactaaatatatgtcaatatataaattaaattttattttataataaatgatttaaattaaaatctaaaattatttttaattgttattaatttattttaaaaaattaaggaaattcaacttgaagatagacataaaacaaaataaattgaaagaaataaatgattaaaaagaccaagtatatgcatgaagacaaatgagagtagtttgaaatggttgaagaaaagtaaatttttttcttctaattgtatgagtaatgtggtgaaaggcaccttaaaaagagaaaagagagaagggttttgagaacattcatttgagaagataaaaaactcattcttagagttctatcttaattataatataagagtggactatttctgtctttatacacgagtattagagcatgaaccagatttagttattcctctgcaaaaccctgcacctgcttatgtcagttatgggaccaaattaatttaaaatc

SEQ ID NO: 4567 - DNA, 653 bp, Glycine max
agcgaggtaggaaataatggcactgtaccacattataaagcagtctaaacttagataacaatctcaagtgattgaatacctgtattatcaaccataggcaaggagctcccgtaattcttcccatgtacactagccctctggaattccattttgttttctgttagtgttcctgtcttgtctgaaaatacatagcgtatttgacccaaatcttcatttatatttaatgatctacactgaaaccttgacccagagcaggcatcatacatatccctgtcttcaatcatgaagtatgactgacccaatcgaactaactccattgtgatgtaaagagatattggtatcattatctgaaacactataacagaactcaaaaaggaaaaaaatgcttccattggtatcccataatacttatatttctttccattatccggtccattggtgaagtatctttttctgtagtaaggcaaggtatcaagctggttcttgtggcgtaccaaccaaagacacatcccaatggccacaaccaaacacatgataaaaagaaaaattgacaaccaaagggtttctctgttcatgtaagtttccagtctgcttctcttggaaggagaagctgcactgttcaacattgctttttgtttcctgtcctgcataga

SEQ ID NO: 4568 - DNA, 1494 bp, Glycine max
gcaaacaatgaaggttatctgttggaaaattcttcctgtttcatacatctgtttggatcatgtgaaaagtttgtgtggaactacataatgaagcactagtagcatcctgagatattctttggatatagtaattagaaatataataataagaaatgctagctacacactttcagacatgctcttttcaagtcacactctttactattgggtgcattgttttgtgggtactgctccctttctagtgggtcatgcataaatttcacccaataacaaaaggtgtgttgctacttgctagccgttctcatacataatatatggccataaattatgatttcctcattcacacaacttgtgctacttatatttgatttcatgaacattttggattcgacacagtgcaacatgcaattaacaagtatctgtaattgcattttctttattgacagggtttgtttttaccttcagtcatttctctagttgttcctctggttctgatctccttgactaggtagagactcttcttcctacactgcaaaagtcagctgcaaaagctgatttgaatagtaagatttagcttaacatataatgttaggaacttggcaatttctctattgaagtatcctaaaaatagaaggaaagaggaaagatttgaaaaatatgatgaaagtgttattactgaataggagggtccaataagccttccgaggacaatttagatgatgctagttctttactttttcagtggagttaatgggaaagaacaaaggtctctggatgtctttgcctctgaaccgattgctcctcgagggcaacttgttttctcagtgagtttaggagctttgatttttgtcccagtgttcaggtccctcacaggtttacctccgtacatcggaatgctgctcggacttggcatgctttggattttcgttgatgctatccattatggtgaatctgaaaggcagaagctaaaagtgccacatgctctgtcaaggatagacactcaaggagcactatttttcttgggaattctattatccgttagcaggtagtgcggaaatatattttaatttttatgctgtgataagttttggacaataaccatgtatcaatgcattaaaaacaattataaaatacatcaagtcatcgacaaaagtgtcattgtccctttgagtagtagggcatttgctatgacttaataggtctgatatccacaaagtctaacattctggaaagatgatatattaccttgtttttacctttttcctatattatgagatgcatatattgttcttttgcatgaactgtgattacatattcttttgctgacatatctttaaataacctagttacttatgttagccggttgtatgtgatcaattttaaccatcatgttcggcagcctggaggtagcagggattcttcgggaaatagcaaattactttgatgcacatgtcccaagatgtgaactgattgcaagtgctattggactaatat

SEQ ID NO: 4569 - DNA, 839 bp, Glycine max
  misc_feature (795)..(796): n is a, c, g, or t
tgctctctgtatgcctgcagctcgcgatcgaagataatacattccagtctttagaccctttcatgaccaaacaaaaagcataaaattgatcagcaaacatttggcctaaaattccccaactgtgtaaagaataatgtaaaccaccaaggaaacaaaatagacaacatataacatttaaacccaactatatatttgtacatcctacataaatttatcttgcttcacacacacaagcaaaagcactgtgttgctaccttggaccatgcatagaaatgcaaggaagtcagctttccaaagttgggttgatccatgtgaatatttaaactttggctctgatctatgtagcatcctcgatcagcagccatatctaccaatgtcctttgtttaatctcccaaacagttctgttcaaacaaaatttagttagagtgaatacattgaagaaaaattcgggttaattaagaaatcataaatctcatacttgtatatactcttcagtacagcaggcatttctggaattttctgaacagagccatcttcatagataatcttattctttaatgtaggagaccacagtcccatttcagtcaagtcatgaagaagatgcttgttcacaacaacaaattcaccactagaaacaaacagttgcccaataagataagatcatgggaaaataatacaccaagacagaataacacgggcgaaaaagcaaacccttaaactctacgactgtagaatatttgagtatatgggttcaaacactcattatttccaagaatctggctagtggatgcagnntgcataggggcacgagaagtgatttcttgcacattacttgaat

SEQ ID NO: 4570 - DNA, 1574 bp, Glycine max
ataaaaaccaacatggtactcagtattcaacaagtagtgcggaaaagattgttagttgcagacataaaacaagcaaattctgaatttagagtaatccagaataaacttcataaagaatcaaagaatcaatgaattatttgcaatgttaattagactagatttgttatagacaaaatccctttttccattgttttttagaagaaacaacatagcaaaacatactggacatacctttaaaatcattcacattatagtattatactctgtaagcacgcaatgatttttgtatacccataatgtccaagtgtaaagagaaaatattttttttcagtgtggaaattcaaagaacttaaatttccaaaaaggatatcggtaaatgaaatgtaaaatgttcccaatttcaatgagatttatatactaaaacagattaagtgattaactaaatgagacaacaaagaatacgtgttgaaggacaactacttgggattttcaatgacttcaaacccaattgcttcaaaagaaaatgaaaaactatcaagaattcatattcttaatacacaatttcaaccaaataatttaataatgttttgtaacttgtcataaattaaaattgagaaaactgaaaacaataacaagtatcatccaaagtgtgatagaagtctgtcaattgccaaacaaagcattacctgacacttgcagaaagatatgcagaaggattgattcgacaacgtaatctaaggtttgaaacactcaatacacagactgttgcatctaaaaagctggcatatatgagctggctatcacatgagaaagttgcatgtgatattggtgctgatgaatcccgtgggaaccactacaactcaggtttcatacattagacaaaagataaatttcattatttacagtcaacataaaacagaatgaactaacctgctttaaacattctagctttgttgcttcataaatggcaagctgtgtttcatgtacaaccaagaagcggatctggtcctgatgaaattgtacacgggtatctgcctgtgctggtggagtcctcccagcaggaagttgcaagaatctagacttctgcttttcccatccgtcagtattccacacacaaatctgcacaatagacagataactctatatatatgatatagaaggggcaatgcattgccaacagcatgctcaaagggggccataattgatgaaaagtagttataagatactaaactaagtcttttaatgcaatttaatcatagaaaagggattccggagaaagatctccagtggacaattattacctgagcatcagccccagatgaaactagcacattcaacacatgagaaaaagcaagaccagttattcttttagtatggcctttgagtttacttttaacctgcaaagaagaaaaaaaatgcataaacaccttattactcaaataaaaactgagcaggaaatgtttatgggcagcaatgatacctcatctacacggacattatatatttgaatggaagaatcatccatgcctatagcaataatattgttatcctgaggatgaaaagcaagaaaagtt

SEQ ID NO: 4571 - DNA, 1328 bp, Glycine max
attatctgattgcaaaatatccgccaatttcattataatcttagatttttccatgtctgcttcctcaatagcaaggcaaacatcaatgtcacttttagaaacaccaaacgaattagcacatgatccatagagatatagattagatgttggccattctttgctgactaatttctccaatatcgctactaattgcttttgtttcagcttttcttcttcaggaggtattagagacccatatattgcaaggaaaggaacattaaaatcatcaatgtcccttcgacacatcatctgccttctgtacattcttccccgctggctcattatctgctgtcctcttgaatccaaaaatctaacatcctgataataaatgctgcaagtgtaagtaagcctcataatttaagaatcatttacttttcacactatgagaaaacaaaataaaaaccacatgaacctcataatttgatgacaggtagataactgtaacactcaataatctatctatctaggtttttgaacaaacagtccttcagcgttcaaacaagtttaaattaataataactcagaaaataaaactccattgtattatcaaccaaatgataatactcaaagtacttgatgaaattcagttgaaaatttagcttttaagaatgatttaacaatccgtaacatcaagcaacatcaacaaatataactattgaccttctctcgcgcgggcgttgccctcaagtaagtcctgtcatcagactcatcctctaccaacagggaatcagctaactgctccccagggacatcaacatcagcaccccttccaccagactcaggaacaccctccatcttcaacctccaaatttctttatgtttaccatccctaccaccaacttcaccaatgccagcatcatttcccgaacccgaatggaggtgactcccggccggcggcccggggcgatcaagctgatcaacaagccccattttatggcccacattgcctctaacattgctcctctcaccagacaccattctcccaccttccctcctatcatacaaattctcattcctaccctccaaacccttccctctagtcctgttcccaaaccctggtggaaccctacttgtctcagggggtaacgaaccaccagccctataacccccaagtcctcttctttctctctccacagcatcatggttaccttgaacaaccacattcccactcgaatttgaagtggggtgatccactctgttgaacttcaaattgagcaacgagtcaccaccattggaggaaacttcggcggcggaatacgcaaccgtgggtaaagacccgagctgcaggc

SEQ ID NO: 4572 - DNA, 770 bp, Glycine max
  misc_feature (737)..(737): n is a, c, g, or t
  misc_feature (741)..(741): n is a, c, g, or t
ttcattacgttttgctgattattacaggtgcttattttttgcgtttggcgtgcgcttcgcgtgaatgagttgaatttctttcaggatcgtttactacaaacgtggttgcggctgcaccggtgttgtactgcaagaggacgttggatatttccaacactgtaagagacttttatgtttctttcctagtttgtgctgtgtagttttctctataagcagcttcattgtccatggttctgtatggataaacttctttataagcacttaaaagagtagaaaattagttaaaaaattgacttaaaatcaacttatacatccctgattttactgaagttagatgagagtgcttgtataaatattaagtgtatagcaatttctttgattctctctttctgtttgtttgattgggtttgtgtcagagaataggtgtttgctcatcctacagctaagattcgtataacataacatgtttgcattgtaacacttttgaaagtcaatatttcttgcttgactgctctcgctaattaatcagttttgcaacttttcaggcacgtgctgtgttaactaatgcaggtcaagcaaatgcagccacggtaggccaccaaaaccttttgttttgtgtgcctgtgggtagtattcaatgaatagtctactgaagtgtagttcactctagttacttcagggaattgatgaatgtttttccatgaacttagttcattaaactcttttttttatcaatntttntgagtgaaatttctaaaaaaaagttagcg

SEQ ID NO: 4573 - DNA, 1470 bp, Glycine max
  misc_feature (365)..(365): n is a, c, g, or t
tcgcttggccttctttgccgtttcctggttctgctttcctcagtggctatggcaactgatttcactgttggtgatgggactggctggactgttgactttaactacactgcgtgggcagagggcaaagttttccgtgttggtgacaccctttgtaagttcaaaacaaaaaacaaaattcatattctttaatctttatcttttctatgttactagttaatttgttggtcagatggttccttagaggggaaagaaataataaaaaaaaaaaagataatttttttaattaaaataaaatataaaaaatatgaatttcctaaaagcaagagagttaggactaaagagaaagtcaaataaagatcttttgnattgtactataatctcaaatgttattagttcaaatacatacattaaatgataaaatacaagcaaaaattcctagattcatagaaatgtaaaacgacatttaattatgttgtttcaattatattttttaaaacattaatgataaataataaaatttataaataaattaataataatataacgaatattaattattttattagtgtatagtaacactcactgtgttgatgttaatgaatggggtagggttcaactattgagaacacgaagcacaacgtggtgaaggtgaatgggacacaattccaggagtgcagcttcacgtcaaacaacgaggtattgtcgagcggaaaagacagcataacgctgaaagcggaagggaagaagtggtacgtttgtgaagtggcaaacccccttgcgctgctcgtcaaatgaagcttgtcatcaacgttgaaaccgcagctcctgctcctgctcccacttcctccgctcattctctgctttcttctgtgtttggggtcctcatcgttgccatcgctcccatctttgcgtgagatctcagacacttcattgtcacgtcatcatcttaatttctttatgtttcttttttgtttaatttttcatggctgtccaattaatgaattattatgttgacttattttgttgttgttgtatcgtgatgtcaacaatacatgtctaatttgatttggactggaagatacaaatgtttgtggaaaagagcatggttgccaaatcttgttgtgtctttttatgggttcagttgatgtccccatgtgttttcttctttttcttggttaatgatagtatttgtctacccaacagtagtttacaatagtcttaattactgcttgatgccaacttaattaggatcactaattctacgggcatgttctgttaacctatttttgctttaaaaaaataaatcttattgtgtctcttaaattaataagagtttaattatagagttgttatatactctcttcataaggaaaataatgaacgggcacgtatagaggattagtacgttttacccaaaatgggaataatgtgaatcaaactaaacccagtcaaacgcaggcagcaagcagg

SEQ ID NO: 4574 - DNA, 1448 bp, Glycine max
atgaatcacaattaagtgatgcgtaagcttttacttggccttttgatggtcaaaatcacatttatcacatttttgagttttaactgattagtggtcggtcagttaaattaatgtgtaatgtagtaggagctagtccacattcatcctactttaaaattttggctctgcaaatcctcttctctttcatacaaatatacaatccaagataatgaaaagagaaaaaaaaattgctctggattgcataaaattaaaattgtcatttttgttgactagtatatagttgaagaactggtatatgttgagcccccctgcccgccctgccctcctcctaaaaaaataaagcttaaataaatcattgttgaatgttgatgaagctttcacagtatttttggctgaacattcttgaagtaagtgtttaaacttcctcatatctttatctttgcataaattccacgtgcagccctcgtttttcccctgtcgttatgatgtagaggaggggccaaatccttaaattggaattaataggagaggagaaccttgactgtagctgaaaatttcttgtcccatacacagccaatgagaatttctttcctctgtcagtgtcaccctatagggttggaaagagcagtccatttgtacataacacgggtgcataactgaactctgattccaatttcaaagttgaaaagacatcatatgatggatgaactcaaaatcctaagagttaattgtatattactaagtcagcctcaaaactctctgcactaatcactgttgctagttgcatgatttttttcaatggcttatataatattattggttgccactacaaatagaacacaagagaaaacattatagtacaaaacaataaatcatgactcatatcttcaattttgattctatcatttattaataattacctgaaagttacattgagtaagtaaacaaaattctcataaataattcatgtaaaaatgacaagaaaatcattgaggtgcaaaatataatttcaattggtccttctttgtcctactttgcatttcttcaaaatctatctctttctgtgtatgttcagtggtacaacactaaagataattacttaaatcatattgcagagccttagggagtcatgttcttgtctttcatgatatttacattatcctaggatactataggataggatgtcatcaggactgtttttataactgagattgatgtcttgtaaataaatatatcattaccagcttgttcttgctttttttgggacattgacagttgatatttgtgttcagcagtggaaagcactctttagttggagatctttttggaattctctcagctatgtcatacggtctatttacaggttaagcaatgtcctgtctattctgtttttatcagataatttagatagatcatgaccacttcttcaactcattactgctgcaggc

SEQ ID NO: 4575 - DNA, 841 bp, Glycine max
  misc_feature (766)..(766): n is a, c, g, or t
gcctgcagattccaggatgcaaagttcatctgatggacgaaggcgaagccatagaactggcacaaggtcacttcacaatcatgaagatcatggacaagaacgtgccactagcaaccaccataaaagttggaaacagtgttcagtggcctctaacgaaagatgagccagtggtgaaggtggatgctcttcactacctgttctctctgcctgtaaaagatggtggtgagcctctaagctatggtgtcacctttccagaacagtgctatgggaacatggggatgttagattcttttctgaaggatcaatcttgcttttctggtttggaaaggaataagaagagtgatcttaattgggaggattttgctccaagggttgaagattacaatcattttctggctagggcaattgcaggagggactggccagattgttaagggtatcttcatgtgcagcaatgcttacaccaaccaggtttagtttctctgttaaataacaacactttactgttgttttttttggataaatatgttttgacactaaaaaattattatacacctagtgatgagaaggagagaaaagtaagaaaaatatagatatgataagtgatatgatgtgataaaaagaatgagtgaaaagtgaaagatgttgatgagatgtttaaaattatgaagtgtctaaatattatggattttgaatgagataaattttgtaagttaattttgaaattaagtgatttatttgaatatgtttaacggaaaaactaaatntgatgtaaaacttactgtaattttttttaactaaatgctacgttttttttttatacttcttagtcaattgagatt

SEQ ID NO: 4576 - DNA, 874 bp, Glycine max
gccagacttgcatgcctgcagtcacgtgatatatttttatttaaattttttaattaaactatttttagtcatttcaatttattaagttggacggttaagattttactctaactttttttcccaccatgattttagtctagcttaaacacctgcaaaatccatctgaatattagaacttgacttaatttttggtttgatgtattttttgtttcaactatatatattattcaagataaattgtgcaagactaattattataaaaaatgccgattcaaatagaaagtgaatcttatccccctcccttctctatctatacataagttcactgctcttttttttttctccaacttttcctctaaagaaagagaaaaaacaaaatcaaatattggtgtattttttgtttaaaaaatttgataaaacattgacgttaaaagaattacttttttgaagggtaatgtataatcatgtttaagcataaacataggtatgtacttaaaaattttaagaaattaacaatggataagttatttactttttaaagagattttctttaaatatatttgactcagcttcctattttaaaaacaaggataaaaaagaagagaaaaaagtaaagtcaaacactattgtataatatttcttttcaaattttgattaaaaaacatttaaaataatgtataataatttttaaagcacaaatataggtatgttttttaaaattaataaatctgctatgtttaaaatttctattatactaaaaaaaggtaattttcttattggaatttgaattcaaatttttagcgtagtttttttaattttttattcctttattaattaatatcctaaaaatattatcaactaatgactcttttag

SEQ ID NO: 4577 - DNA, 823 bp, Glycine max
ggatattaaaaccaaaatgtgcattagggacagtctataccgcttggctaagagtgctgagcaaagacataataattcaaatgcaaatggttgcattggagatgatgaaacatgcaaagcaatgatggcgcaggatgcaaacaggtattgcttactttcttcgcttcagatttatatttttcttgactacaaggtagccaatataaaaacccatcagaatagtgtatagcatgattttgagtgttagtagttctgcgttctacttatatggcatttgtggtgtttccaaagatgtaatattcttttatttatattctcatgctgacacataacaatgctctttggatttatctcgtgtttatgaattaatctttttgataacacttagtttcattcaggtgtgccggattaatggatatggaaactgacacaaaccccattgatcggtctgtagcacacttactgtttcacaggccctcagatccatcggtgttgcttcctaacgaaactttacctttcaaatccagtgccacggtatgctttcatgaatttttgacattttttcgatgaagtagaattgtagaaagagtactcattggtttaattgacagatgcataatggatcagtgatcaatccaccagtaaagactgagaaacaggtctgtcaggaagattctactggagtggaaaaaaggtttacagggtaacacctcatgaaagtgaaacccagcgttggcgcattttcgtcgtacaatttatacttttttcggtcatccggcgtatatgatgatatataattatttcgggcttactcggatgcctt

SEQ ID NO: 4578 - DNA, 547 bp, Glycine max
agcggggggcaagcattcaacaaaagtacatctgcgagaaggtttttgatcttctaaaggtttggccttcatttgttcttttaagctctaaacaattctactgattctatatttacaacctacaatcataatattcacttataaatgggcttcccttgcacctttttttatttaactctaaatgttgtgattgggatttggatcttactaacatgagatcgttgtgtttggaaataacatgtttgaaaaaataaagagaaaatccatccatccatatccatttaatatatgaactcgttactatgtagcataaaataaattttgttgaagcaaaattattattgacagtattttcatttgttttaccaaaaatatggaatcattcatgtgcaaaatctaattttgtattgtaactaacacagcctggctaccaaattagtgaactataataataaaataatgaaaacattaattacatctaacactctcaaatgcaataaaatctactcaaaaaaaatgcacaagcgaaaataaagtatatttttct

SEQ ID NO: 4579 - DNA, 883 bp, Glycine max
  misc_feature (15)..(15): n is a, c, g, or t
cttggctgcctgcangatctgttgatcttttttagagccttatttttgttatttaaagtagggaaaataatagttttattttgtaatttgggaaaaaacaaataaatagcagatatatagattaaattttattaaaaaaatatctgtgagacagaatcactatttcttttcattttaatgtagtagcaatataaattattattataaatataatttggatcctatgcattatttgttggtggaaacgagggagaacactgaagttggtggaaacatgtttttttgtaaaaatcagtgaatgccactctagaagcatttgacaaacatgctttaagggaagggagtggaaggtggaagagaaacatctgggttcattgcgaagaggaagacaaagttccactctggaagacacctctgataaagtattacacacaccaggcaaatgtggctaactggaaagactctgcaatgaggaaacaaaactttcatagggatgagttcctacgttgcacgagatgcgggaaggagtgcaggttccatctcaagagcagaccagacattaagaactaccatgatgctttaaccaacaaacgctagacttgttctctttggccttatcaaaagtaagttgctcaatcccaaatcaagctgtatgatattcaagttcatgcatgattagcattttctggtgaacgtagttggtacttagtcttgcaaaacacattatatgttggaaaaagaataggggactcacgatgtgtcaataagagctagagagacaaaaggatgagtgatattgatattttactaaaaatcacaaaccttcactagagacatccagcttagtaaggacgatcattatattaatgctacacgatctttt

SEQ ID NO: 4580 - DNA, 774 bp, Glycine max
attttactcaatttaaatgacaagaaagtttgttttatattacactgaatattgattaggttaaaaacgtaaatgagtccggctaattagagaatttaggacattgattttaaggatactgattaaaaaattaaaaaaatatttattatataaatcataaaaaagattatgaataatataatttttgttttcaataaatatttttattataaattacttaattaatattcttagaaactgcctaacatttcacagaataaattattttgtaggaatattatattatttaaaaagagaaatatctactttgatcgattcagaaaatctattttagtactagtactgatttaaacccaagagatctcaatgtaataaataaagacttgaaaaattgcttttcgtttgtctcgtaaacaccataataataatatttagcaccaaagttagtgcatacctttgaccgagggaacggcatctttgttgcttgcccctttggtcgttccgaagatgttcatctctctctaccacacctattcatttactagtactaaattataaataaataaaattaaacatttactagtaataaattataaataaataaaattaaaggcaaatatgaagaagtgtctttaagtaaaaaaaaaaaaaatattaatatgaaccgaattttcaataaagatattttaatcgagaaggcacacaaatagttttcaactccctccgatgagggccgttttggctaataagaaattgcataataaaatgattaaa

SEQ ID NO: 4581 - DNA, 706 bp, Glycine max
aattcctgccaaattctatatctaatttggaatactttggacttgaagataaccttgtagcatccagtttggtaggctgtatattccaagacttcttactttggactttttcaatcgtttcagaaccacttctactcaaatgatcttttggttttagtgcagaaaagtcaggatccttttgagtacttaaggtcccaacaatagacaccacaggatcctgtgaattctgtggaattaaaggttgaggtaatggcactgatttatcaatagaccttacagaaccactagtcatcaaaagatcatgccctggtgatgggcaggaacttctaagtaattttatcataccatgaatgttactttcttgtttgctgaggcaggaatttccatctttaactgtattcctatcacttccattgttacaatcagcgactttgcttaattctgttagttcagcatgtgtaattggttgccttgtgatcacagaatccaactcctttgccactgcccaaggtgctgtcaagcttcaacagttcacttgttacatctggcctggctagaacttctagattttgttaatctctcatcatgcacactttttccagcttcgttgctctgataatcccctttgtttgcttcattgacgccacaacttccatttgcaaacaagggttgttgactatctcaaatgactcattcaaattattag

SEQ ID NO: 4582 - DNA, 1532 bp, Glycine max
cttgctgcctgcagttctgtcacaccaggggcggtttttcttttgtggtggtcgaggctggtttcctcttgctgccattgtcgagctctcaatggatggaactgatatggatgttcccagcatgagtttcctcctgctttcttcccttcttacttctgagaagacttcccgaattttgggaagtggtttggttccaagaatccttccacaaacttcatcaagatccttgtttagtcgcaataggaacttgtaaatcctatctttttccaccatttccttatacttcttcttatcttctgtacagcaccatgaaacttcttcatatatgtccagctgctgccaatgtctgtagagtatgttaaaatactccgtaacagaggactctccctatcgaaggtgatggaatatgctttttatctcaaaaacagcagatgtgatgtccacgtttgagtacatttccttcactgcatcccatatatcttttgcagtgtcatagaacataaaattttcaccaatttcatttgtcatggtgttgagtggccatgacattacttgactgttctcaagtttccatttttgaacatttgtgtcccctttcttaggacactctgaatctcctgtgatgtagccttcccttccttttccttgaagaaagatcttgactgaccttacctagttctgaccattcagtttatggtcaatgatgaggggagtaagcccatcatgtgagctggtcggtaatgatccaaattctccactgtgaacgattcatcagatttttgttctcccatggcttggcggtcctaggtttagggatggttcagattgagctttgataccatgcggaaataggtttttattctcccttgaatctgtgaatggtacatgtgaggtatatatagaatgcacgggacagaaataagaacaataatttagcctagaaatcaggggaattgatctccctatgaatgcaaactagtattagagcccgtgcaatgcacggacaaactgatttattgtagaatatcatgaactgtaatgacagaaatgacagaaatgacagctaataattatgtgacagctaataattatgtatataaaattctaatgagctgtacacacaatctgttgattctgccttgattttcaacaccttgtctaaccaaaacaaatgtatatattcttttgtaatgtacatcaatcataatttgattgtatttcttaattttgcagtgaagggaaggaactaaagaaattgatactcagtgacctctattatcatttgcaaggagaacttgaagggaggaaaattgatattggcccattcaaagaattatctcagtatcttgttgaatcaaattttttgggaacgtatcaacacctgttcaatgaagactcttttacaaagaacatgtttacaaagaatgtgtacttgtttgaccttgcacacttgcgagaagatttgagattagatttgtgggattgttctaattggaaaacatccaaggagattgcagaaaccatgctgcgtt

SEQ ID NO: 4583 - DNA, 1401 bp, Glycine max
gcctcgtttcccgggggtcctctacgtcgacctgcagaatctcaattgcagcggttttttgaccctccagacgcaaactgttcaacgaattcgccaaatagatgggtaattcggcggtgatttcacgaatcagcttcatgcagccgtcaaaatcggtgttgatgcttaagactaaagagccgtttgaaaccggttggattagttgcgcggtggagatcttgttggcggggaggaagacgatggaggggattccggcggaagcgcagtaggcggagagcgcggcggaagtatcgccggtggaggcgcagccgacgccgacgacggggcggttcattttgcggaggcggttgacctggctgacgagaacggtcatgccgagatccttgaagcttccggtgtggctgattccgcagtgcttcacccacaaatcgttcattcccacgaactgtttcccgaagcgttccgcccagaagagattcgagttgccttcgaaggcggaaacgatgtcgtcagggtctatttctggtaggacccactccttcttgctccacacgccggacccgtacggccacgtcgtcttccccacgcgcgagtcgaacagcgcgcgccagtacgcgccgtcgaagcgccctaaagcctccatgtcatgctgcacgtcgaggagtccgccggaacggctgcggtacacgatttcgtcgagcgagtaggtttccggcgagtcgaagccggcgttgaaggggacgtacttcgccgtgaagtcgttctccgccgcggggcggcggcgggcctcgtccttgatgttcggcggcgaagaaacatgggagtggttgttggtggtgaggtgtgaggaggtgcatgatactacggtggaggcgcggcggttattagggattaaaattgaatggattggaagggtggtggtgaaggaagggttcagcagagaagacaacatttttactaaattattgaattgaaggattggaatttggagaagagaaaaacactgatgaaatatgaatggttctgatgttatttatcgaaggagggacaagggaatctcaggttgatgcgcacgtgtagtttaactctcaaaacgttgcaaaaaaaataaataaagaaactgtgtgtaatcaactaatcatgtcatatcaatttggttgtttcaattttcttaaattgaaagataataaaatattggtttcccgagaaattagtgataattactgttgttttaagtaacgtttgctcttgataaattgatgtgctcgagataaatgtaaatggataattaatcgttcagggagggtatatatgcatgagcctgaggtggaaatgacaatattgtcgtgtctcaccatcaataataaaataaaatctggattcctttacagtttaatttat

SEQ ID NO: 4584 - DNA, 915 bp, Glycine max
attaaatcagacatgaaaaatggagtccttcaatgaccaaatcaaaccagcattgatgacaacaggctctagaccaaacaccttttttctagtcttttaaggatatgtgtgatagaaagagagaagtgacacttatgttgttctcttcctcttccattcttcagctacaaactaaaaaaacttgagaaaacctcttactaacagctcaaactactttttgtcaactcacgtgaaatgggagttgaggaaattaatccactctgagctctcaaccctggcttagtctttgaaacatatgtggaagactatatcagattcctttgttattatggctattcaataaaaaaatataagatcaatgcctatgactaactttaactgcccaaggaactcctctgaagaccttatctccaacatcaaatacccatcaatctcaataagaacacttaaaaggcaagagaaagcaaaaaggttctcacaagaacagttaccaatgttggatcccttaatgccacatacactgtaaaagtgtgtgcacctgagggattggttgtgaaggtcatccccaataaacttgtgatttcagagggtgttcaaagaatgacctataaagtctcatcctatggcaaggaaggccactggtggataccatttttgatctttaactagccctggtggtaaccattttgttacaggtttttccacctaaaggtttttaactaccctgctggaccttaattaaaatcaataaactcaatagttccttacctaccttttggaagggtttacttgttcctactttactataatgggaattttgatttgaagtgtcaactggaaacaaaactttccttcctttggcatggggtaatatatgccaatggtttctctttagaggaataaaatttcctcggg

SEQ ID NO: 4585 - DNA, 814 bp, Glycine max
ataatttatgttggttgggcccccttctttagcaaggtgggtcacaatgcactgtgtagcaatgtccctatgtcagggtgtgtctgttcttcatttttcatttagaaaaatcttcaattcagctcagaaaaagtggactaggcaaaagcctcaaatctcaaatgttataccacacatcatttcctaagaatagaagatgaattcaatttcatatggaggaaaaaaatcatatacaatgccccataagtgtttttgtgtgtgtgatgccttagtttcttagtagttggtttcatatttcttaaaaagtttataagattcattatttgttcaattttgtatcatactatcatgtatctttttttataaattattttattttgaagagcacattacattaatcctaggagtgatgcatttataaagtgggatactatatgaatttaaacaattactgtgcagatgtggagcaatggcaagttaaagaaagtgagaggcagaccaatggccacagtgggagatgaaaatggttcacgctgcataacaatgtcattgctgataactcttccaacagatagcagagtggctccactccttcccaaggcaacctgcaacaaggaacaaaaggaagaagaagttgatgaagaaagcaatgatggtggtgaagaactagagaagagggtgttcaactcttttgattttgaggactatgcttggagagtgtaccatgaacgcatcattttcaaagatccattggataggtaccgtgttgctttagaagttgtgtttgatcttctcgccatcgatgttttgtgtg

SEQ ID NO: 4586 - DNA, 788 bp, Glycine max
atcctctggatcgacctgcagtccatgaaggataggccttggccctgaaggaagcaattttatggcttcaaaatcttgacattgtgatagagcttgataatcaacgtgttgtcaacgacctattcctgacaagtaaatttagttgctcgtagtttttaacagacgacttctatatctcatgatgattcttgtttcttaatttgatactttatcatcttgtactgaggagaaagtcgttattgaaataatgagttattccccataaaaaaaatcctatcatagattaccccacaaactgaaattgttatttttataataattatttttaaaaaatcatatttaaatttattttgaattaattaataatataaaaatctttgcaatgattatgtaagaaaattgaactagaataagaatcttttattgaaaaatatttattatttcagaaatataaaaactattcagtatatacttttaaaagtaaataaaagtatttatgaagtatatttaatgttcttttatctttactttttaaaattaattaataaaacccaaattttttcatctttcatagaaacatatatagatagatattctatcaggatattcaatatttaatgatacttcattgaaagatatataattgaagccactgtcccgtcaatttcggcatgaacaaatttggacccctgtccctaaaataactgacacaaactctgaattcgtgattgaaagctaaagtaaaaaataagtgacacttctctaacttcaaaatcaatccataaaat

SEQ ID NO: 4587 - DNA, 849 bp, Glycine max
  misc_feature (787)..(787): n is a, c, g, or t
cttgcatgcctgcagtacaatatacaatttgaaatcaaaacaacaatttaaatttagaacaagggttcataaggtttcaaattacaaaacaacaaattaagcagatttttaagtacaaatccagcacatagctcaagtgaaacaacataaaacttctatagacttcataatcaatctagaattattaatagaaagcaatttaggacatcacaaacattttttcctgcacagctaacaatattcttacaatataaaggagccatttatgtactgaaatgaatataaaaaaataagttcatataataataaagaaaataactgaagaaaaatagtatacaacatatgttcatccttataaggctataagctattagaaataagaaattcaaatgacttgccatgttttaaaaccatcttgacacatttcagcatgtcctaattcttttttctcaccattgtgaagctgttctgacaagctctaatccgttcaattgcatttcaaaatattttcggagcaaataattccaaaaggcaaatggattggttaaaccatcaaataatcatatctatgcttcttagacaagcatacaccagtagtaaattgatgtcatgaactataaccacactttcatgaaaaaagataaagtcagcaataggtaaatttgtccttcactacacacctgagctaccactctatgacccctgtagtcaattatagccatagcaagaattataaagtccaggaacatcagcttcttggtaagcctttgtgcccttcaaatcattngttgcagaagcatatgtgggcttgctcattctcggccagctgagcttctggagaaacatctg

SEQ ID NO: 4588 - DNA, 802 bp, Glycine max
atttgaactcactacattggacatggtttatatctcaccggtcaatgctatttctagctttttcgggtatatctgatccattaaatgacttctcagggtgatctatactgtttcttgatttatctctcctgtctacgctggctcttgacttctctttacggtctgtgcttgcacttggcttttctttctgatcaatactcttcaaattctccttttgatccatgctgagtctggatttctctcgaaagtctatgctgttcctaggtttgtcaagttgatccggaataagatcagatccagttttttgatgcggtgacttctcaatgactgtgatgaatttcttgaggtgctttatatattgagggtaaagctccaaatcacagtgatttcctcctttaatccataagggctcgtacttttgtttacaattttcccaaagttgcttcccatgggagcaatccactacatcatcagctgttccctaaagtataaaaggcaatacaaagaacaatctcagtatataaacacggttgaaagttgaaccacaaccttttgtagcattatacaattcatatgctcacttattatgtagttgagagatgaaaaaccattctaacccataaatatgttcccaaatatctaaattaaataaatagattggccatatgaatgcaactcgtaagctcacttacaacacagtttaccagttaaagaagcattctaacccataaatatattcccaaatatgttaagataaataaacaggctaaatgtttatcataagcatataaattggtgcaag

SEQ ID NO: 4589 - DNA, 527 bp, Glycine max
agtttgcatgcctgcagtatatattagccgccgacgtgaacaagtggacaccaacttaattataagacccagaaagttcatgcgtctaaaattcaaacaccataattttgtagtagtatttcaaacggttgctgctaggtttgaccacccaactcaccattgaaaattttcaagcatctagactagtaaaaacaaggaaaattaaacacacaccaagcacatatatataaataaacatctataactttataacgcattcataaaaaaaaaaatgtcttctagtactctatcgccaacgcatacacaacaatacttattatattaatcatcttttggaactatatatttaatagagccgatttctcttaccaaattaagaaatcaaatcattttctatcttctaacatctctatatcaaaaaaaccacacccgcatttcttatgctgtatgaatctgatataatgacagaaattgaaactcctcaattttttctttggcctatttcgcttcaaatcatgaaggaccct

SEQ ID NO: 4590 - DNA, 1358 bp, Glycine max
ttggatgttttgagaaaagagaaattggtggccaacaagaagtgttattttggtcaaacatctgtggagtacttgggtcacattatctcctaagagggtgtagctatggatccttccaaaatccaaagtttgcttcaatggccaaatccaaagaatgtgaaaggtgtgcaaggtttcttaggattgacgggctattactgtaagttcatcaaagactacggtacaatagcacatccccttactgatcttactaagaaggaggggttcaagtggggcattccagagcaggcagcatttgaggctctcaaggggcagatgactacaggcctggttttggcactaccagatttcagccaggaatttatcattgaaagtgtcgcttcaggtcaaggtttgggggctatcttaattcaaattgggcgtccagtagcgcacttcagcaaaacattgaaggacaggaatttgacaaaatcggcttatgaaaaggaactcattgctgtagctttagctgttcaacattggagacattatttactgggatgctaatttacagtgtgcacagatcacaagagcttgaggcaacttcttcagcgcataacaacaatgaaccgacaaaactgggctgccaaattgttgggatatcggtttgatattgtatacaaaccaggtttggaaaaataaaggagctgatgcgctctctcacatgcttttcatactatggtgcattattcccgtatggcgagaggggaaagaggagattgaagaagtcctccaagacgagagtcttaaggaggtaatagaagccttaaaacagaactgtgaaacaaaagcagatttttcctacagtgatggtgttttattttacaaaggcagactggtcatctcagctaagtcatcctggattcctattttactcaaggaatatcattcaactcttcaaggcggtcactccgggttctaccgtacttattgaaggcttgcagccaacttgtattgggtgaacatgaagaaagatatccaacagtttgttaaagagtgtaatgtttgccaatgccagaagttcctagctgtagctccaggaggcttattacagccctttaacattcccaatcagatatgggaggaaatttctatgggtttcatcattggtcttcctaagtccagagggttttctgccatcctggtggtcatggactgtttgcctaagtacagtcattttattccgctgaatgtatacagctaaggtgttagccgaaattttcactaaggagatagttcgcctccatggagttcccgcatccattctaagtgatcgggatcctattttttgtaagtggtttttggaggaaattattcaa

SEQ ID NO: 4591 - DNA, 838 bp, Glycine max
ttgatattttctcctaccacatccttgattgtaatcttttctattacaggtagagcatttgggttataagcatcatctggatgctccccatataaaccagtgaacgtaatagcaatatctacattagccaaggtcacgttagagacatagatatttctaacataaccacccctgccaggagaagtctttattctgattccattatatgaatcatagaattgaatatcttctgcatgaacttcagatacaccaccagacatctcacttccaatagcaatcccacttgtttgagttttaccaactagcctgtggatgataatgtttgtgcttgggcgaccgtatgcaatgccatactcatcccacccgctcttgatggcaatcagatcatcaccagtgcttatataacagtcttcaatgcatacgttgtcagaagaatctggacacatggtaaaggaatgtgtgtgagactctaataaatcttaattatgaggatgttaatactgtttaaggggtacattgctctaaagctaggaaattaccttcgccatgatgcacaattgcataaatttagatattcagtcttcatttagcccaattgaattttttttctttaaaacactttatgaaaaaaaggcttgataccgcaccaaaagtccaaaactttttcaagttaaaggaaaatatttggtaattgtcaattacacaatagtatgggatgatattatgacataaagggaggatagttcacctgggacaattccattccggggtttggtgaatcatgagggagcaaggatccctgactttctgaactgggaacttgggtgggtcatcccta

SEQ ID NO: 4592 - DNA, 1499 bp, Glycine max
gacatgataggatgctcccaagtctgggaaccaagtgttgttagttgtaggacatgaaccaagtattcctgaattggtgatcatagcactaggaagacgtgcttgttgttgaggctgagattgctgaaattgctgagggaattacacttgctttggcatcattcccaacaagttggcagaattggagaaactgttagattgataagctccatagttctgcggtgctggcatgaatgaattctaaagatttgaagtctgaaatccttgaagattagcaggcatttgaggttgataattctgatcataacaatgatagcaatccaaggctggatgtccaaacttgtagcagacttgacactgcacattggaaaaccgaccgcgacaaccgcggcctccaccacgattgttccaactgctgcgaccacgtccaaagctgcgaaacccaaagtacgagttgtagttcaagtttgcattttcagaagcaacatttgcttgagcagaggaggacgattgttgttgcgactttgaggaagggatttcgatcagatttagtgaagcggtttcagatgtgagcttcttctgcaacttttccaaactcatctcatgtgcaagaaagagagattcaacttcctcgatttgcatcggctgaaatttgctttcggtgactgaaatcactgagttgtagtcatgtaaaccttcaaggataaaatcaacatgttgctccagaatgatcggatctccgaccgacagaagttagcacatcaaccaaagctttgatgcgcaacagaaattccaagacggtcttgttataaagtgtagtagaccgcaactttgtgtgaagttgacgagcttttgctcgagttagcttctaaaagtgattgtgaattttctcgcatacttgaaaggagtgaactgatcctagaaggtgcaacagaatcgagctagaaagagttgattgaagctatgtgaggagcatttgatctagtatctcccacacaatgtatgtaggattgacagtgcctgaatcctgatcagcttcacttgcatattgaagaggaatattcggacacaccagatatcggtgtagttgatgtgttttgatcgctggttctacttgttgcctccacagcaagaagttcaaatcagtgagctcctcaaagattgagtgtgggaaagcagaagatgaagagaaggaaggagtagcagaagaaggaggaggagatttggccattgtaggaccatcaagctctagataccaaaatagaatgaaagagaaatagaaagagagagaaaataaaatttgtggaactgtgagatctaatttctttcccaggcagtttcagttacactaaattttatagacataggagacttgcaaagcaagtatctaagacttgcagagcaagtttatgagactcctagaacaagcttctaacagttagctgcggactactaacttccacactctaatctcacttagctgagtagaatactcacat

SEQ ID NO: 4593 - DNA, 796 bp, Glycine max
gcaagagtgaatctaatttataggaggaatattagtaacgtatttttaatacacttttttttaccatttatttatttgaaataaaaatttgtataggttacccttcttatttaataaatttccattctaataatttttaattaataaaaaacgtgttaaaaaaaggttcttaagatattgttgtcaaattatcatcttcaatagaattgctgatccttcatctaaggatttcaattttactcaacaatgctcaaatttcctttcaaaatgatatgaaattcagtccaaactcaatgccgtcacccaccaattccaaccacaaatatcctttttgtctgtacattcttcaatgattttaacgaactattcatcgacatgaaacaaaaacaattaggggcacactataaattattctgctcaataaaatggaaaataaaggcacattgtaacataaagacaaatgtcgtagaataaaattttatatggtattaatttcataataattttaataaagtttttaaatattatatttctgatatttacatttattcaattctcatcatttaataaaaaatttagtttctgatattttaaaaaaaatcctaatttcaatcagaaataaaaatgaatttagagctgaattttcttttattagaaaattgtttgccgcgagaaacccaagatttattgggatgtcattgggaagggattcgctaattagataacgattccttcccagaatacgctcatttgaggggcgggaaaccccatttatgttttacgtacgtataatgta

SEQ ID NO: 4594 - DNA, 791 bp, Glycine max
agatgctgttaaaacatacaagaactaccagataaattacttccagatcctcatttttatgtgttaatcataatcctctcacgttaaactcatatcttggctacaccttcacattttggtaacccatacactcaccctcaacccctaatgtgcttggaaacgttctcatggtgtacgtacataaaataaagggcaaaagctatttgagtttggatctcctcatgtaacatttctgtcaagggaaacatcccttaattaaaaattagagagaaaatttaaataatagaaaaagagggacatgagattttgatagtagaaattttcatggaaaagaatccaagtaaaaatctcattgaagaatatccatttatgattaacttctgctcggacacacctatttaaaagtactatatgatttttttaatattgaaatttacttgtaaaaaattactaaacttcttatacaactaatattaagaaaacataagagaaatcgccttgaggaagcagtgattgaagcaaactcttctgtcttctatttgaaactagaacaaaggaaaagacactctgtaaactcagcacactatacagacgaggcttttgggtcatggcatggcgttatatcactcactgattgcactgaaatagtgaaattaactttataatagacttcttttattgcccttacataagcagctaacaagatcattacaatgaataatctaaatcgccgatgcccactgcaatgaagagtcattttggaatgtttcattaacatgcatacaaatttt

SEQ ID NO: 4595 - DNA, 770 bp, Glycine max
  misc_feature (724)..(724): n is a, c, g, or t
ttacacaagaaaatgttataaatttatgataattttaagaatggattatagtgcttttaactactaggcctagatgcaaattataaattttcgactgattaatttttatgtatgacccaaaaacatgacacaatctgcgtgtccaagtcccaccaaaccccttcatatgtacttggttttttatggtgtttgtttttggcttgaatcatgcgacctgcctattttgttttcgtttgtattgcactacttatccaacccctgcacaaaattgagatatataatatacaaataaataaataattcacaagtatagttatttattggtttatcatcattcgatagtttagttagcgattttgtcacattcttgggagagaacattacagaatcaaggaaaagtgcttttggtactatgtggagcaagtaagttcttaacaacttcattacaaaccttatgagaatcagacttcacagaaacatagagcatcttcactaaccaaccctgttaattaaatggctcaaccattatgcatcctctatatatacacctgtaacaatttcaacattacatactacaaaagaactgcaatagcccgttgtgatggactcagggaaagagggtgaggcaccagcagccaccagcagcccagaatcgaggaggaccaggagccatggaaaagtgaaagacttttgctgatgctgcgccaccttctggacctggagnttccacaaaagctaccccactcccaagagggggatggaaaaaaagg

SEQ ID NO: 4596 - DNA, 651 bp, Glycine max
gcactattatgtctcctccggttgctcttccggctctgaccacaacagccccaacccatacaatgagagcccaagaacagaaactcactgtttgaaacatccctgtcccaactcccttcacaagtgcctcccctttgcttataacgtattgtttttccatgttctctgtaaaggatttgattgcagagctctctccaacaaaagcataaactgtttttatttgtgatattgtctgcaataacaacaccagagttgttaaaacaaaataagattcacgtttattaagttaggtctcatgatgcacatttatgtgacactagaagaactattgtaactgaaaactagactttgtattgatgtaaatctaattatgcatgcatatacctgctctatcatagatgtagcttcagaatggaaaagcattttggtggttgatatgctgttcattttcttggtgtaagttgcccctattataagaataagcggaacaaccactaaacaaagaagcgttacttcccaacagcatatggcagcaatcacaattccagcaaaaaagttgcacagctagaggtgaagtgacccaactgagagtaaaaaaatcactttgaggtttaatccttaaaatgttgccaaaggaaaaaagagggagaa

SEQ ID NO: 4597 - DNA, 835 bp, Glycine max
gaaacctccatatactgtattcatgtccattatgtttcttattttgtcagtcccaagctcagggatcaacttcttgtagtacgcagcctgctttttccacttactgtcgtcatgtttgaatgtactatcacttccatgatgaagcattgaaatcctttctggtgtaacgtgcaatcgctcaggccacttagaaatggatgacagaccggatttcttaaacttaggatctggaactacaatacaggagcgaagtggagtataccatgcagaatccggttcaaggccgtcgtcacatttaggtggataggtatctctaaccagcttattataacaattgttgtcttgagacttctgccatacagcaatgtcaccctttgtattgaacattttaaagcacaatgaagtcagcaattcctgcaacttctcataatctgatctgtttgcatcaatggttgtgttccatccacgccacctgcgcttgtagttgatcggtggaccagacaagacccaaaatcctccaggacgaagtatccggtgaatttcaaggagataaattccacctaaaataagatacctcgtcaaaaagaatgagaatttagagtgaacttctcagcactaagcataaagagattagcagaaaacaaataacaaatcattaaaacagtaaaattagagtgaacttgaaagcctgaaataaatgttggacctattcaattcaagggcatactattcgggcaaggaaaaacgcctcaatagcgatgacttcatctttattaaaagcaaagtagtaaaaagttgctgattaacatcaaaattccagtgctcattgaaatct

SEQ ID NO: 4598 - DNA, 676 bp, Glycine max
cccgtgagcctatagagccgacctgcagagattgaacgaattgtccaaaacataataaatatacttatatgaaagaatcccgtgcttcacgtgtatacaactcaggctgataaatccatccattggtcatctaagaaagcttgcagatttaaatttaaaagaatgcaaaaatctagtaagcgtacccaacagcatgttggaactgaattctctagaacacctaagtcttttcggttgttcaaaactgtataatatccatctatcagaagaaacattgtgtgtattgcaatattggtggtacgtaatgacaagtcaatgacatgaaacgtcctggtgactttgaatttaaaatatatgatgatcaatattttcatgttgaggtgaagaaatatggttactgttgttgggtacatgaacaggatctacaactatcaaagttaaccggtgaaaattagttgcttcggaagctctagtgttaataaggcgagaagaaatgcctagtgctcagttattattttttagaaatagaaactagaaaataaactattatttggcctgacattatttcttacctgtcgtttaattttttaatttggcttttggaacatttccctctcttaatttgcatgcctaatatataatttccgaaatgcaagccctatgccgtcacatgagt

SEQ ID NO: 4599 - DNA, 821 bp, Glycine max
  misc_feature (709)..(709): n is a, c, g, or t
  misc_feature (754)..(754): n is a, c, g, or t
gcgtcctatcctgtctcatacttctaggtgatggtctagggatctaattagcatgattgtaactttagaatatagaccaagaattttgttacggaaatagttatacttgtttcataaaacacgtataattgattaactaattatcaccaagtactaactaaatggtaaacagcaaagttgacccacatccgcggcacctcccctctcccaaaaaaacaaagcactaacttatttacctcacaacagacacaaaatcaaaaggaacaaaatatatatgtttttagtctctatttttagttaaatgtgatcaagatctctatattttatatgggtaaatttggtcttcaaactttaaaaagtatgtgaatttgatctttaataaatgaaaaattaaattcacatgttttttaaagtttgagattaaacttatcaatatgaaagtataaatagcttggttacatttgactcaaaatataggaattaaaattattttttcccaaaagcaaataatgattcaaacaagaagaccaaaaatacaattgattctatttaaataactatataaaaataaaaatgtgtatgtacgtatgggtccctcaaaatgttttttataacttttagtcattcattggttttttattcagcatttgtaattggttgttttaaaaaaatgttcatttttagtcttttatttatttttactactcanaattagtctcaaatataaaatatactatgaattaaaaataataanaatagaattaattttaagtaataaaaataatgagagattaaaaatggaccagaataaataaagaaac

SEQ ID NO: 4600 - DNA, 1505 bp, Glycine max
  misc_feature (1392)..(1392): n is a, c, g, or t
tgaacctcctgaatctcatccacctgattcaacttcttatcattggacaagccacccaatgcagaagatatttcactacttgaactcccttctggcagccctttctcctcccccacttcctcctccattatctccacctccctcatccgtcctccaactagatgcctcaactctgaatcaattctagactcgtcgccatctgatccaaagctttgccttgatggcgactgatcggaactctgcatgtcacacacattctcataaagctgttcaatggagggctcaactacctcatcacccccaaaattagcaccatcatcaccctggcctctttgcggactcacggaaccacccctcggggacttaaccagattcaagggttccttagaggtggaatcatggtccccattcatgtcattactcccaccttcatcatgatgaaccccgtttctaacaattcccggcatattcaattctttcaggaacaaaaacccctgcaacaaccaaaatcaaacatatggtccacaaaatcaacaccccccacaaacagatccaacaaaaaggaacttatccaaacaaacacacaagaaagaaaaaaaaaaatcaaaacgcacgtgtctaactctaaccgttttatcattcaagaccaacgaagacacaatgataaaaacacatacatctaaaaccacaattagcaagagtcaaaatttcttcacccatggatctcccataacctcggtcagaaaacagaaacggttgcagaaccaaccgtgtcacaaaaatagaagacctttttcagcaaagaaagaagaaaaaaaatattcatcctaacaaacaaactaacaaacaaacaatcaccacgaaccggattgaagggaggcataaaaaaataacaacaaataataataaaataaagacagagaaaatcgcggggtttttttcttttgtcttaatttttttctcatttggttttttcttcctggtcggattcggaggcataaaaaaccgaataataaaaaagaaggggaagggacacaaaccttaataagaatgaagcataagtgatgtgaattgagaagcagaggttgtcggttgcagagagacagagatgtgagagtgtgtgtgtttatacagggaaagaacaacacagagaaaaaaagaacagaaactcaacaacacagtaatctgttttggtgagatgttatgtttgctaaagagagagaaatttgggttttggaggaatgagagaaaaactgaatgaaacagagacctgactggtggtgatggaaggggcaaaacgggaaattcacaagcagggtagtaaaaaaagataaatttgatgaagaaaaaagagggttttttttctttatgaattggtgcaggcaacggtcngcaatttcgtttttgccagactggcagtggattctgtgtagaacactgctgagatatgtatgatttgtggagtactaactaacattattaggagtttccgatagatggtagag

SEQ ID NO: 4601 - DNA, 836 bp, Glycine max
aaataataataaaagagaaaaaaagtgtaaatgataagtaataataatataaaaatatattatatgcgagaaaaagaaaaataacaaatactgtattaataaaaagtatgcagttagagtgtaaaaaacaatactcagctataaattttttatacatgtttttatatatgtataaaaaggtacgtaggaatagaagaatagaactgtattaaaaaaataaaaatcactatctaaaagtagaagtatacatgtttttattgtttgctggtgttagtggatatgattttctaaggtcggtttaaagaaggggttaaaataatatggatgaagtctaagatttaaacatcaatattatcattgtaaaaagaaaactggatatgattttctttataaaatttggcccacttccccgtgggcatagagttgcaaattaaaaattcaatgttacaaaaagacttagttattgatttgtacttaaatcatttaaaatacatcaatttggtttttaaattttaaaacgttcaaattagatcttttaattattagaaaaggaaaaaggaaaaaagaaaaaaaaaatgttctatcgagtaacttacaatacgtgtccaactcttccagtaacaccacatgcaacccggttaaaaactaaaaaggagggactttattggcaaaacggataaacatgtatttttcacttcaaatttgctcattttagcaaagaaaattgcagcagtagggcccacaattttttgaatatttctgtggtcccaacatatgctaaatcctaaccacattgtgccgtcacattgaacgacacttgtcttactgaaaataca

SEQ ID NO: 4602 - DNA, 583 bp, Glycine max
aagatcatttctaatattatcatagaaattaaactcattaacaaattgattatgtagaacaatttatgattaaatagtcgtgcatgtctctttatacaattagtatatagactgtatactcataaattataaatgtattccgctaccaatgtttggtataaattttgacaaatgttggtgggtgttgtagctagtaaggaagactgagtcaaagagagtgtgaaaggtaagggagcaaagagacaaaaggaggaatagtgatttggcaagtgggattgagattgaagcaatgccgtggtggtctcaaacacccacacagcgattcgtgtctgtgtcaccaaaccaaaggaccataaaccccctctgagtcactagctgccgcccatgccaccactctctctgatcaaattacttcctcaattacacatgcttaaccgtctctactttaatcattttcctttccttttttcctttaataaaacatttctttttatgtcttttcattgttttctatatttttggatgcaatcaagacgacttctaaagtgaaaaactgttttgtgtcccaagtaaaaaaactttt

SEQ ID NO: 4603 - DNA, 1709 bp, Glycine max
aactttgagggtctgcaccactcaatgcctaaaggtcctaatttcctctaacaaatggaaagatgatctccctctgatctctctctcagccacccctcttatttatagacaacatgccttatttaaactatttcagcacactaacctaatcaattgactcattaatgtaactaattgactcgttaatgtaactaataattactaagtactaactattgggtagctatcaatactccccacccctattaaacattcaccttgtcctcgaggtggacagcttgtggcagctgaaagaaagcccacatcattgttccagttgtttgaagcatcatgaacaagtcaaccagaccactgcagcccaaaattaactttcacttctcctgcgtcaaacacaaatatgtgagcgctctcatgcttctctagtgctctgtttgtttctgaatttttagccatgaaacagagcatcatcaccactgctctacttgtaatgagatctcctggctccctggtgaactgcactgctgcacatgatggaagttcctgggttgtaataagaaaacttttgtcttggtactcgctgtccttagtgggtcgggtttggctcattaaattcagaaatttattatctcctgctttgtcagtcactccccttcgtcgtcctctccttgcaaagaccttgatccagtggttttgatgatggcagcttggttaatatggtataccttgttttagctctatttgtggttatcttacaaactgtgtcattattctggaattgacagacagtgcccaccttacaagtgtcgcaatcaaaccgtggagactgggttagcccacatcagagacagagatccatctttgacggtgacccatcctgctccatggaagaacacaaatctgctggcttttgtggtgatctcttaactggacaacctgagataccaagttttgtagccatgggagaacagtgcttcatattcacccataatggtcaacccctccatgtccccaacaaccactttctccaataacctgcggctcttctccttttgtgccttgtaactcactggcaaaattagatttaccttcaaccaatctgcctcagtcaatctgtgtattttcaccttcaattttttcaaatcctgactcgttatgatgttctctcctatcttttgcactgaagcattttttttttaaatttcttttgtttcttcatgtataggaagcagtcctttacacctttgctcccatcctgtgatgacattagtttggattttatctttgtttctgcttccaccatatcagcgatccctccatcctttaagacttcctcttcccctctattttttatgctcctaagattctactccatctttcaagacttcaggtaccctctggtttcttcctttcaaggacctttaccttctcttctgtattttttcaccaacaattctcattcttccatgagttccctactgaaagtctgaaatttgctatctctatcctcatttcttcaagaatgttaagaaagtgtttcttcattcttgccaaacttgaagagaccctagaccctcctatctacagttctacactacccatagctcgaagatcagagctctcgtattcatatcagttgaaagaaacccaatatctttactacaaagaatagggaagaaagaactccccaatttatagactagaacacacac

SEQ ID NO: 4604 - DNA, 855 bp, Glycine max
  misc_feature (778)..(778): n is a, c, g, or t
ttgcatttgcctgcaggtgggtcaaagtaggagtcacttagacaatcacaaccattaaatttatgtgcatttgggggaccaatcttgcataagaattaataacagcgtcagtcactagcacccaagtttctacatggtgtgtggacctttgtcacccataatgtgagacagatataccttaatcccaacagtcccaggttgacaattaagtgcactgtcaaatataactaccatcactgagcgacaacctcattgcatacctttatctttttccttaatgagactgagaaaggaaacttcaataacccaaagacacgtacagagtgatggacatctcatttctggcatgggagtataagacgacgcctacagtatccaaaagcttgtaggatagcgctaacacaataataatgaagtagaatcttgaccaagatatacttaaaacatcattaattagccaagtgaaatcaactccacatattaatatatttagaaccttgcttgtgttttttagccaagctgacacatgcagacccttgaatggatatttgtgaaatccatccaattttaaacggctaaaaataagtgaagaatattgattgggctccgcagttaattgagaaagtttggctgcattatttagtttcgaagttgtttacctaactttcctaccctgcgacgtctatgagctttagctttatgccacgagagctttaattggctattctaatattacacataaacaaatttgaagttcgagaaatagcccagaagaatncattttatacaaatcaaggcaaatatatcaagacacgactctggtatgtggctaaatgcattacagctgctgatact

SEQ ID NO: 4605 - DNA, 1064 bp, Glycine max
  misc_feature (985)..(985): n is a, c, g, or t
  misc_feature (1054)..(1054): n is a, c, g, or t
gcctgcagcccggtgatgttcagaatctgcataatgctcctcccccacctcctccatcagtgtatttccattcaactgttgggaattaccacgttccttctggtgttcccccaccattgccatcgtctccaccacctgttctgccggctccgccgcccgtaacctctgcatcaccaaatgccgcacgcactgatgaccctcactctgtgaaggtttctggcttggaatcaaaggctgtggatttggttgacggagttgtagcttctcatccatctggtcttgtgcctgtacatgattctgattctaattgggatggtgcaagttgtagagaggttgctggtgctggcagagatgaggatcttcccccacccaagccaacagaagaaaaaactgtgcagaagattgaagctttgtgtcagcttattgctgagaagggtgctgatatcgaagataaaatttgtcaagatgaatttcagaatcctgaatatgcatttttcattggtggagacccgggaactgaagctgcaattgctcacacttatttcctgtggatgaagaagaaatataatttggatactcgatggcatgaaaagagaagacaatcagatatagtatactcttcaggggaacagtatcgtctgcatgttacaaccgtgagtgccgattctgacatggaaatggaaggttagttttatttgttactttatgattctggcattaaaaactgatatttaacaattttcacgtttaggtattaaattatggtatctcttattaagtgtgctctctgctctctgctgttatatattcttaatatgtaagtctttatagttgtattggatttggatgctctaaagtgcaggatgcacttttagaaagtaattatggtatctcttattaagtgtgctctctgctctctcctgttatatattcttaatatgtaagtctttatagttgtattggatttggatgctctaaagtgcanggtgcacttttataaataccagtacttggataacaaatcatggaaatgtgagaaccccaatctttattnttgcatcact

SEQ ID NO: 4606 - DNA, 699 bp, Glycine max
gtcgacctgcagggaatgacattattggtcaactttatcttgtattgagcattatccaacctcctctctagtggagtctttcttgtgctcacaaaaaatttattcactctttccacaatattaaaagtatatagatcactcaaaatggtgaataagacttgaggaaacaaaattcattcaaacaatagcaatactagaaatatagttttttacgacgcacattttaagatagttatttgggaccgtcttagaatgtgacgcggtgacaaacttgtaattaacatagctgaaaattgctttttacaatgtacatcctaagacggtcgttaataaccgtcttaaaatgtgcttgggtgacaattttgtaatttttggcaaaacaacaacaagttttacaaaaaccgccttcgttttaattcgttgtaattacactatctttgcacacagcagacaccaatagctttatgcatttgaaatcctattctaaggcaccaaccattgcgctccgacatgaaaggtggtgggctcctcggctagtcactcacattgggaccctctctctctaacttgtggaggccctcaccttcgtagaccccagccatttgtgagcctctggtaccttggctactcactcacattggcttcgatcaacgcctctataagctgtggtgccccagtcatgtcattttaagggggaat

SEQ ID NO: 4607 - DNA, 604 bp, Glycine max
aagatttggtgacaaaaacatggttatgatttcatagatcatacatgaataaatatagagggtaaacaaaaaagttagcttcactccaaaaaaatgaagcttaccacagccctttcagcaactaaatatcgaggcaactgcttaagtgtcccaacaacatcactactttctttatagtacttacgtgccttggctattgcacttttctgtatttaaatacattgttatgaagaacaaaggtaatcaatttattatttttaactatcagcatgtaattaatcaatcaagacattatccattatatataatagaaacaataaaaaggatatctccatctcttggatcgaggatcatgtctacagcaagtttccattcccctcggagtaatgcagctccaataaggtgagttggcaaagaaccacttccaaaacgctgagcacagtgagcacattcacatacaaattagttgcttgtaaagcataaatgaaaaataaaattaagtcttaaaataatcagtctaatagaaatgaacttaagcctaattcactctcaaagctagctcaagagataagattgccagtcttataaagagtatctgaccata

SEQ ID NO: 4608 - DNA, 809 bp, Glycine max
aaggaacataaaactatccattcatttctgaaacagaaaaaaggaacaaaaatacaatacgggaatcttataccatatgtgaagaaatatcagtggtaggcagtacaatcttgggatcaaatgcagatggatcacgggattcaattagttgtttagtctcgacaactgtctctgcatattctggtctgtttaagcagccttggcaagcacaagggtcggtacagtacgtaccagcagcaaaacaatgacagtaactgtaaagtgctcaaatcaaaagacagataccgtgtatatcatatgtagtgagataccaaaacatataaaaatccacttacagttttaaacatctactcttcttacagttgcaatgtttacagccatcgtcatcagcagtctctgatattttcttcctgaagagcaatgcaatgattggtgatgcaactaagcatataaagagtaggaatcatgaattataagaaagatcaaaagaactgactttttctggcaggggctagaaggtatgttgaagtcctcagaatttcctgtatcatcaatttcatggctctcagttcttgtattaactaatgatcgcccatcaacattagacgaaagtatggatctctttacattctctattctttgtaaccttattgaagatgtgggatttcatcccctgtggaaccatctgataatctcacacccatagttgcagcctgaccagttggaatagcattcatgatgcgatttatatgcaacccaatacctgttggcttgggacctgtaaaagggaagtttccactacctcgctg

SEQ ID NO: 4609 - DNA, 857 bp, Glycine max
agcttgcatgcctgcagaacagttcatgcatgagctcgggcactcaacatcacgttgttgtagcttcagtctcgtcggcaagcaatcctgacaagccctccataggaaatgtttgacattcgagggtaacttaagcttccacaaatgcttccagtttcctgtcaccttgtattggtcccttgctacctgactacgtacgagcactatggtaagctgtccgaactgaataatagccatccttgctccacctctagaccaacctatcttgaccctcaatattcccaagagggactctcaacactttatttgcatcttcaacattttattgttttgaattaaaatataataaaaaacttaatatataatttacttacaaataaaaataaattaaaattataaaaaatataataagttacccgctggtatatccaaacatgataaaacctgacgaagataaagatagatattaaaactttaaacctatctcttttatattcgtatttgtcccgtcttttgtgaggacaagaatgaggaaaacctatcggtgtctctctttatttaattctatataattaaattaaaaataataatgaatctgaccaaatacacattctcataattataggaaattgagattttttttaatcttttttaatacttttatttctttcaaaaggaattattatattaaactttttgtttgggtttataagttttgagtatgtaattatattaaatatttagatgaataatttgggcaccctaaaaaaatcatatatatctaacttaaataggattatctcatatagatgatacatgtggatctagacaaatttttttaaaaatgtttattactc

SEQ ID NO: 4610 - DNA, 1438 bp, Glycine max
tacttgcatgcctgcagaatattgcatcagatttcccaatgccaataagatcaattgtgactgtaaaagggtgctgtgctgtagcttgcctctacttttacaaatttgttgtcttcaactttgtcagatctttacaaaatcatcctgtcgattattctattgtactaatttgaaaattccaactcttgttaactgacttttattttccattctattgatgtttcattgaaaaaattgggaagtcccatgcattaattctaaattaagtgaagttacttattgtagatgattgcgaaaattaggcagaatcatgtgattctgattgtacgactataattaggatttgctattatttcctttcttagttacaacagttatagggattttggttcctgatttttagctctaaattagtgtacaaaatcagtcttgtaaccctatttatacacaccattgcacctttttcaaacaatagaaaaatacagttcatttttctatatggtatcagagctcgatctgatacttccctgaacccagtgccgggcctaccatggaatgggagaaaacagaaaacgcaaccaaaggggagactaacatgctgctaacctgctctcctgctcacctgaagggattgctctccctatcacaggccacaaactgaatgggcaaaacttcatccaatgggagaggtcagtttgcatcttcctccaaggaaaaggaaaggaaaggtatatcctcgggtgaccccaaacaaccagaaaaggggatcccaaccttcaaaaatggcaactggaaaacagtttggtgatgtcgtgccttctcaataccatgacaaatgaaagtggggagaacttcatgtattatgacaccgcataggagatatgggatgcagtgaaggagacatactcaaatattgacaacacttctgccatttttgagatcaagagcctgctccatgacatgcgccagggagaaaaatcagtcactgaatttttcatcaccttgagtagatactggcagcaattggatacctacgaagaaatagaatggaagtgtccagatgacaagaagaaatacagagagctggtggaaaaggacagaatctacaaatttctgttggggcttaatagggaccttgatgaagtacgtagaagaaaatttatgctagggaacattgcgccagccccatacatttaaaacacgacattggcagcaagagggaatcagatacgtccaccatagaagaagaaccgcccctggtgtgatcattgcaggaaactaggccacaccaaggaaacttgctgggacatccatggtaaaccaccagatgcaaagtcattctggaataaggaaaccagaggcaacacagcttataacacttctcaagaaggagaggtaagttctgatccaagtccctttagcagggaacaaatggaag

SEQ ID NO: 4611 - DNA, 770 bp, Glycine max
aagcataaaaaaaaataaaaattgttcatccccttattaataatgttgcaggtctcgaactttctttattgaaaaagaaataagttacattttggcccatgcaggtctcgaacctgcaaccttcgcgttattagcacgacgctctaaccaactgagctaataggccaatcatattttattctttaataaataaaataattgaactataatatttactacaattttggacactactcaaacattgactatagttagatgatcaatttttctctgtttttccatagttatgcacctgtgtatcatagagatcactgtaccccttttctgtgaacgctggatgactatattgagatttcaaagtctaaaattaatcgattccgtattgttaatttaagatttactattattattgtatttttaaatgtttcattttatctatattttataaaaagaatggtaagaaaactatgataagaaatgggtgattataacctttattatgtggaatgaatatattccccaaagtatattatgacgtgttgagatatgcggaaataaggaagtaaaagaaaaggaaaatattaaaatatttagagtaataaaacaattttaaaaaaattgtctaaatcacatgtatcatctatatgagataatcctatttaagttagatatatatgattattttaagtgacaaatttattcatctaaatatttaatataattacatactcaaaacttataaacccaaaccaaaaagttaatataataaa

SEQ ID NO: 4612 - DNA, 683 bp, Glycine max
  misc_feature (590)..(590): n is a, c, g, or t
  misc_feature (626)..(626): n is a, c, g, or t
gtgcatacccacgtctcgcttctcttgatcatgtccaactttggcaccttttgcacctaagggcgtttgtggtgggggtccacccccagaagggcctaggagcaccatgaacaccagggggaggtggaggaggaggacctcgaccaacgggaggaggtggaggaggaggacctcgaccaccaggaggaggtggaggaggaggacctcgaccaccaggaggaggtggtccttgaccacccggaggtggtggtggaggtggtgctccatacattggagggggtggaggaggtggtcctctcccaccaagaggtggtggtggtggaagtgggagaagtggtgctcgactcaccacgacgatgtgtttgtggtgttacagaacgcttgcttgagtagctgctacttttgtttttaggttaatttaaaaatttggtttgtacatttaacatcgcatgatttttatatagtttagtttataagtagtattttttttttctctttcaaatgattctcccccgattgtctatattgcagtgatgttagaataatttttactataaaacaagtacagtaaatttttcatgtaaggatcnaaatgaaatgtaatatctattaaagatagggactanagctaatacaattgtaactttaacaaatatattaaagctattcatgtaagaaccaaa

SEQ ID NO: 4613 - DNA, 839 bp, Glycine max
gactctgcatgcctgcagtagaacagtctagaacagcttttggttgttataaatatcacttaaagcaatgaataaagcagaaaagttatcttcaacctttccttttccttcttgttgctggagattacccttgatctcgaaaccaagggagaagcactatcaggtattcaagttgaggcttaaaaaaaaaaggcgtgtgcatgtaaatgattaaccagatagttccatttgagagttaaagcttccatttcattgcaaggcttgatttgcttgtcgtgaattggataactccaatcaaaacaccgccacctctgtcttcgcgttcaccactgtgcagtaaatatgtctgacaccgaagaccatgcagcagagtattccaatggtgacgaatcccctccaaagcccagacagaggttcagggacagatctaaggtcaaactaaaacccaaaccatgttatgtttttcatttgattttcgacgccacacatgattctttcttgatttttacgatgtgggtcttgtttggttttacttttggctcaacgcaggagatgctgtccaaacaagctgtgcagaccaagcaaatgctttccaaacaggccgttaagattgccaaacaagctgaggaacacgaaaggttcatcaacaaggtcacttttttcgtttttctatttcaaaatgtttgctttttttaaaaattattatctggggtgttgaacaattcaatgagtttatcatggatagtcaaaatattgagcatgctttaattgttaatcactctttcataaatgttcaggtgacccatctcgcgggagtccttcgttttgggggattttgc

SEQ ID NO: 4614 - DNA, 728 bp, Glycine max
tgcctgcagaggagggtaaaatcattataatcagataaatgtgtttggaaagctaagctgaataataaagctgcacggtagctaaggaatacaataactgtgcaggttggtgtgtaagtattgcatactgaaatagtttaccgggtagaattggtttctttttcttttactttattcatacttactgttactgtaaatgtaaatattttctgttttcattttatgtttttaccaataactaaaacatattatcttatgttgaaacatgatttcattctttacttttgttacatgttggatgtgttactatgacactttctgttgaaaatgtcatcacgcgggctgttgagttgtaatgcctgtatataggctgatgaataaagtgtcaagttaacatctaatagttcctctacttaattttttttttatcagtggtatagagccaggttttttcttcatcaaagaaacatcacaactgattaaaattttcttagtacttggattgtatagcttataagcttttgattgatcactaacaccaagaaaaatgcatttttctcccttgtcatctagctttttcctcttctcatatgcaatatggacatacacttatagccgatcttggtctccgctccatgctttcttccgtgtcatattttgaacagaaagagtgggacttctattcaaatatgactactccattaacagcttcgcccaaaaaaatttga

SEQ ID NO: 4615 - DNA, 782 bp, Glycine max
ccgactggtgatacagatttctaatgtctctccaccagtgggaaaagccccttttgtcactaccattttggaattctgaccaaccaccatattttgaagttaaaattctaacccagagctgttgttgattagatgcaaaagcccatatccatcttcccatcagagctatattgaatttagagatatcctttatccccagacccccctcagtcttaggcaaacaaatatcatcccatttgacccaagaaatttttttgtgatcattgtctccaccccacagaaagtttctttggagggatataagctttttgactaccctttgaggtattttgaaaaaggaaaggagataaattgggagggcattgaggacagaattgataagggtgatcttcccaaccatggatatatttttctgagcccatttggctaattttgacttgaatttagtgatgataggctcccacaccagctggcttgaaggattagccccaataggtatgcctaagtagaggaaaggatactccagctgtcggcagtgcagtatattagctgcttccaaagcccaattgacaccaccaccaataatcccaaactgacttttagcaaaattaatctttaaaccagaaactaattcatatcctcttaataaggccttaataacatgaatgttgtcccacacagcctctccaacaaaaacagtatcatcagcatactgtaaaatgttgataggttccttattctttccaaccaagaagctttatagaaaattttttggactggct

SEQ ID NO: 4616 - DNA, 1354 bp, Glycine max
attaaaactctttttggatgggtccaataagtagaagaccttacaagtttgtacctgtagacctaagacaactagagcattattgtaactaggatggaaacatgaaggtagcgaggggaagttagttatatagagagagtatagatgagagacaatgccctttatttcttgaccaagctttgcaacactatgccatttattaactattatggttttgtgtctacttttcccctcaggttctctgttgcatagattaatgtttttctttccttttttaaatctctgtcgtccaggatattcttcagaaagcctcaggggctctgagaagcactgttcagggaactcaaaaagtgggaaagtcagaggaaaaagttaatggaggcagcatccaacccatttcacatagtactcaaaagtctggactagctgaagttaatcatcataaaaaggtacagagaagtagagttttcattaatatcacatttctagatatattgttatgcttatggttgagggtgttgaacactactttggtgtttttcatgttaatgtagtccaccctaaagtttggctatgctttttgacaggataatgaacagcaaatacttgttaaagaatcactcttaacagaggatgttgatagcagagaaacaaaagccagaagcaggcctcaatcacaaggaggcgatggctctaaagaaggtttgagtgcaagcaacagtttggagcaggttaaatatcttgaattcctttccctctttgtcaagtaatctggttccagtgcatattttagtcctgttagaaccaataatttatttcttcttatctttaaaaacgcagaaatattttttatgttcttcacaagttcttatttaaatatgaattatccacattatattcttttggagctttgttaaaaacacctctctgtaattttactatatttttattctcagtaagtagtagaaataataaaataaaatttaggcttttgggtcttttaaatgctatattcaagcattgtatactttcaattgatattttggttttacctctacaaaatttttgcaggtatatttactttttttttgtactgcaattttgatgttagtaattgtgcataactgcatattcctatttgtattcccattttacatgtttttttttttttttcttaacagagaaatcacagcattactaagctggaaatgaaagcatctgtgcaacagcttgcttctcgtgctgcttctagagtcgtggctgaagctgccaaaaatgtaacccctccaactacagcttatcagtttgaggtctcctggagagcattttcaggtgatcttgctctgcaggcatg

SEQ ID NO: 4617 - DNA, 730 bp, Glycine max
  misc_feature (704)..(704): n is a, c, g, or t
  misc_feature (709)..(709): n is a, c, g, or t
gctgtaattaggggagactttccatactttatgagttaacaagagtgtggaaacgtggactgaagtaatcggacagggtaaacagagggcctaaatcatatggatttaaaaagcggtgcacaacagccagctccaaaactgctagggtttatactataagctaagcacacacgagctaacagatgccaaggaacattaaggaaaaaaaatcaaaatagtgacctctttcaaaagtagggaaacaccttgagaaaacagaacaggtgaggcaacactgccacatcagaaaacaaaaacagaatgaaacaaagaagagagaaaacacaatatagagatgctgaggtggaaaaaagaacagatgcctctcatgaagagaccaaaaggaagttgtggagtgatgcataaaagaggttgggtcagagacaacaccggaccagagtgctgcaagctggccagaaacactgctggagagctgggtcagtgtaaggagtcttatcaaatcagaaaaacgtgctttctgatgtaaaacatcaggaaatggcttcttcaatgatgcataaaacaagatggcatggtaaatgggggggattttgcccgtgtgtaagaacagggccagaagtagcaagcaccataattttccaggatagcaagaacgattggaagctgcttttctgactacctcaaacactctgcaaaagtagatnaacangggccttgagcactctggcat

SEQ ID NO: 4618 - DNA, 786 bp, Glycine max
  misc_feature (639)..(639): n is a, c, g, or t
  misc_feature (729)..(729): n is a, c, g, or t
tttacttactgtaaatatacttttttggatccacaaagattttggtattgctagatccactcgatggtgtcatctccttacttatgtgactttggaataagatatagtgcattagtgtgtgtcattgcctcatgagaaaaaagattgtgccatttcagtttagttggaacttaaaataatagtctgtaggtcattctttattatgaagacttctgtggttgttttttcttagctatcattggattactcaaactgttgcttcctctggctttcgttttatacaggagtctgtaaccatgcttttcacttccattgcattagtcgatggctcaagacccgtcaagtttgtcctctaggtatgcaggcctagttccttacatcctctttttcttttgggaccttatgggttaagaagtgcatgccttacttgtgtttctttgcttgtacagataacagtgagtgggagtttcagaaatatggccactagaactatgaccgtggttgagctccttggacatttggaatgtctatcctagcctttgaacatttacagctctatctgttattttcctttgctttcctactgaattattatgttcaagaaatcagcttgtctgatggaattttatatacacgggnggtaatatgtaaagttttattttaatgttttgatttacgtaattcatatgcttcctttcagctgtttgtatttgtaggtgtttgagttgngtgaattggttaaattttctccctttccatgtattgctctgtagttgaggaaattga

SEQ ID NO: 4619 - DNA, 774 bp, Glycine max
tgcagcaatatattttaaaatcattttattttgtaccccaagacagaaaacccaattaattttcattttgcaagtaaaatacctatcaagagggtttatggtaggaagcataaggataggaacgaggtattaaaaatactttcattgtattcttcacttacatcaatgttcttgtatcttcctgatacaaaaataggggttttggaagtgccagtgatatatttcctatttcttgactctaattctgaaccagtcctattactcaaacatgttatagacaagactcacatcaattaatccacatacctgtacattaggttgctagctggggtggtgacttgctggatcgtgggattctagctctgtctcttgcaccaagagataaccatcgagctcaggttcaatttgctctagagcgtggtatccctgcaattcttggtgtcctttctacccggagacttccattcccatcaaactcctttgatatggctcattgctccagatgcctaatcccatggacagaatttggtaccttttttgctggattttgaacttttagtatttaagaaatagaatttattcctgtttgtgagactctttctagtgatcatgaactttagtacattaccattttgtagatgcttaaattttggatttcatgcatttgctgtaaatacattgggttctaataaaatcaagcctttggctaatttttcattgcagcacctggtatttttggaatcttaatcagccaacctttttactaactttggc

SEQ ID NO: 4620 - DNA, 837 bp, Glycine max
tgaattgccaagcctgtctgcctgcaggttaaatgttacatacatcaactgctatcaggacttgagcactgtcatagtcgaaacgtacttcaccgtgatattaaaggatcaaaccttctcattgacaatgaaggaatacttaaaattgctgacttcggacttgcatctttctttgatccaaatcgccggcaacccatgactaatcgtgtggttaccctttggtaccgacctcttgagttgcttcttggtgccacagaatatggtgcggccatcgacctttggagtgttggttgcattttaggagagttattggctgggaaacctattttgcctggtcgtacagaggtgaaaacttaaaatttcttgttttgtcttataggaattttcatttccctctaaactctgcctaacagttagtgttgtaattcaacaaattttctaaaagaagttatatctcctaatggaacagtctgctttctagatatgcatgtatgaaccttttaattattgccttgcaactcccccctcctccaaccctctcttctcatgggggtaagcctatgtaagtttaatccaagctttgtgcactatactgccatttagaaggtcaccattgtgcatatctgcaatgaataggaagatgtgcaattaatgagaaataaactaagaaaaactgaaaaagtttgagaaatatacaaaataggaaagacgtgcaattaatgcaaaaatgaaaaacctttggctttttgtcccttgttcaaacttttaatgtacatgtactattgaaaacaaaactgggtaaaaactaaaaaggagatacaattttaggatactata

SEQ ID NO: 4621 - DNA, 724 bp, Glycine max
atcaattgcaagaagagtgtcaataaggggcagtgctgaaggtggaaaatctttaaatgtctctgttatgcatctcttgtatggatgtcgaggtttaaacaaagtagcattaggcatctttgacttcttccaatactcatcagaaggcgaaccacaaagtttgtatatcttatgcagttgttccacctatgtaagtcatcaagaaaaagtgtcagaaaatatccaatggaaatttcaaataaccagcaaataaagtgcaagtgatatatccttaatgtgacgcaaattccctcaaattacgtaagagaaggtagagctaaacataagatctagtataccacttaaaagagtgatttgctgaaaacagccttggggatgcatttaaacaaatacagaaattgtagataatgttgttttctagttatcagtctgcattgcataattaggcaactgaaccaagattattattactatcatcatagtcactagtactgctaaatccttacaaatgcatgtcttgattatccttctacttttgagggtggaatggtttattcaccattaacccacagctaaatcatatgggaaaactacgactttataacagtcaaccagaaaaaatgttttttagtaataacatattgagctggtagcagcctaacaggtatacagcttctaagtgtgcaattcttttgttgagaaccatccagttatgctccaccac

SEQ ID NO: 4622 - DNA, 1470 bp, Glycine max
cttgcatgcctgcagttcaatggaaacgcatttaaccgagtatgttaccagtattcattcattctgtccttatacgacttgctgcgaatcctttgttcctttataaaatgaattgtcatttaattgaaatattggggcctaatgctaaatttttagggttttataatccacattcttcgggttcgggcaagaagagagagaagacgcaattttgaccctcaatttcacagacctttaatcattcacgcgattcttcttggtaactccgccttcctcaatccataatctgcttttataatttatttatttagtttttattttgattttggcttgctgcaagctaatttacgctcttcagttcaatattccccgttcatttgttgcagaaatctggttttggggcaatctccgtatttcgatattctgggtgtgtatcaaaactgcacctttttcccttgtatattgttttgaaatgctttttagttttaatgactctactgagcttttacttcagtttctttttttctatttttctgcgcgcgttttatgttatttttcacctttgaggtctctttgaaatttatgtttatgtcgatttatgaaatgattattggcaaaaaagtcagaaacaaaaatatgactccaattcctcatgtttcagtctgtgcttagtagagagggtaggaaaggtgaagaggggctgaaaatggaatggtatggaatgaattttcattgagagagcggaatatgaaaaaaaaatcattatactttcctcccggtaggattaaacattattttgggaaattcataattagaataacctgcccctcaatttcagctcaatttcacacttttgggagaggtgtaaatttgtcagctagagtgggaatgagctggccttcactctcaatcagttccacattttcctttttgccgagcaagtgaaatgtcatttctaaaccattccaattcttctatgacctcatttacttccttcttttacatatccttagtaatttgcataaaaatagtttgacttctgctagtgtagagttttcggttctgcttggctggttgggtttcaaagtttttctgctctttttgggcttctagaaacctaatcccataaacccaagcccaaaaaccaagtgttcactaacccttagactaagagaacctagaaaaacacttctttctccgtgactgtcttcaacctcttgcagctctcccccaaaactgctgcacaaattcgctgtgattagagctcctctccgccacatccagagcttttctccaccacatccgagctctttgttttaaaccagttatttttttgttcatctgcggctctgtttggctggttctgtttctctgtttctgtaagctattgtttgtgttctggttctgtttgtctggttcggttatctggctctgttcatgtcctggtgttttgtacttgcagtaggcagt

SEQ ID NO: 4623 - DNA, 1440 bp, Glycine max
aacccctttcacagttgagaataagaactgtattaacatccctccatactacatccgcctgtgatatattttaatgagtaatattttttttaataattgaaaacaaattctttttatcaaaaactaaaataaagagggaaaaggcataaccatccgctcctcatcccacactgcatgatttcaaaatcacaataataatctttcattgtcgcacctcatcacagcttgagcacatcattgtcgcaacctaaatatgtctcacatcatcgtcacatattgttgtagcctaagaacaactcaaacactacaagaaaaattattatttccaacgaaaaatatttcatcagaaacatttaaattattgatagaatttatcaaaagaataaatttcgtaaaaaattttgaaaattttgtatagaaatttttgaattattgatggaatttaccgatggacaatttttccatcagaaagttaaaattacggatggaattttatccatagattaatttctggagaaaatctaaatatttccaacggattttaccaaaggaataggaatctgtcgaaaaatcaaaatttcccaaaacaaaacaacctaaccctagccgagacaatcactttggtttcttcgcttaccactgttcgtattctcctcccccatttttggctttcttgattacaagaattgcacctcttccgtctcaatcattcactgggctccgttgcgcagatgtcaccatcgcggcctctgaccctcatttgtgtgtctttcttcacgtcctctgagcgtcattcgtgcgtcctttgagccttattcacgcgtcctctgtcgagcccacatgcaggtacgcattgttctagaatttttgtttttgtgttttgttttaaggagagacgaaagaagggagaaaaacaaactaaaacgccattgtcgggaatcatatctgatggcggtgaacagttgtcgtagagaaagggggctcaatctaatgcagagggtgtaggataaaactgtagaaattagatgaatatagtggttcttaaaaatggtccatcgtggaagacatgcactactggtccatactagaagcattcattttttattggacagtaaaactgatattaagttggatggagtggatgatgtggggacgcatcatctaaagaagtggtatttggtgaacataaggatagtgtagagttgtgtcattatctatggagtgtagagacgtatgggtatagccacgcctatgttcaaatgttggcggctgttgtatttatctattcttctaagttctaaacccaatttccaaggggagaatctgcaactgaaccaaatgattaaactcaaaaacaagaaaagaaaagtaaagaataaaaaggaaaaaaaaaaagaaagagattttgttttacaagtctgcaggcaaacgagcttccaa

SEQ ID NO: 4624 - DNA, 839 bp, Glycine max
gtctagacttggctggcctgcagctgcagaagaggcaaaatcacaattgagggagctggaaacacgcttcatagcagcagagcagaggaacgtggagcttgagcaacaattaaacttagtacagttgaaaaccagtgatgctgagagagaagtggctgaattatctgagaaaatatctaatctcaacgcaaaattggaagaggccgaggaagagaagaatcttcttaattgccaggtacaggaatacacggaaaaggtagctcaacttgaatccgaattaaatcaatcatctttgcggagttcacaattagaggaggagctgaagacaatcaacggcaagtgtgctgagcatgaagaccgagccagtatgaaccatcagcgtagccgagaactggaagatttaatccagagttctcactccaaattggaagatactgataaaaaggtgagtgagttggagttgttacttgaagcagagaaatacagaattcaggaacttgaacaacaaataagcacattagatgagaagcgtaacgcttcagaagcgcaagccaataaataccttgatgatgtatctaatctgacatcagaacttgaggcaattcaagcacgagcctcaaccctcgaaactacactgcaagcggctaatgaaagaggaaaggagttggaagattctttgaatgctgtgacagaaaaaagaaaaagttagaggatgctgctaacagtttgaatgagaagcttgctgagaaagaaaacctattggaaatttgagggatgatttaaaatctacacaagataaattgcaaagcactgaaagtgatctcagggctgctgaattg

SEQ ID NO: 4625 - DNA, 1480 bp, Glycine max
  misc_feature (1475)..(1475): n is a, c, g, or t
cagtcttgcatgcctgcagagggtagctgaaggcgcgcggctgcgttgttggtgtgctcgttggccagccttaaggcaaggcagtgaagctgtttcggtatgccacttgaggcgacatggcgatataaatattcttgaactatggcttctctggttctttgttccataagcgttacctaagaaaatgttcagaatttaagttgagacttgaacttggaaaactgttgcttctgcattagtttgaaagagtgggaaaatgcaaaatggtaccatttctcttagtttaattgcaaatgtcttggcatcatatccaccttccttcaattgggtcatgaactcttctaatgtctggggaatatcagaccttccctctaattcctctttgccaaggggttgatctaatattccgtatatcacttctggaacctattagaaatcagtgtcgttttcagccaccattagataattctggtcaaatagttacacatggattcacatgctgacaaatttaattagaagagttaaggagattacatttgattcaagacttcttcccaaaatctttggcctcaatttttttcccagacaacctgcaagcattattttttggtaaattaaaaggtcatatacatacacaaataatcaaacttactggaattctaatatctatatgttaaagagtcatgaacctgtttcaattgaaaagaagggttacagaatgtatcattaccttatatttgtgagtttagaaattagaatttgatattagcgaagtgcaaacctatctacttttagaaagaaaacacaagtcgatgatatcaagtttacctaacagtattcttactacacttatattgcacaaaatacatattacaaaaattccatttccaacaaaagaaactcttcatagatatttaagtctagtgcttcttctaaatgaatactatatttgagcagccgaaattgaaaaacaattgactcaattttaatagaagcgccattaatcattaatcataaaacattaaatgcagacaaatagctattgcaaatcatgaaaagttcaaagcatagtaaaatacatgcgtgctttgatatattgataatataagcctcattcaccctgtggtacctctttatgtgtttctgatatgcatgcatgtgtttttatgtttgtgactttgtgtgtgtgtgtgtgtatgagagagagagagagagagagactgataatgtacctatggaagagcacttgtttgctccatcaatgttatccactgctgtcaaaacaaacacaaacctaagaaggaaagtgaagaacaagagagaataaaagagcatccgataagaaagcttccttgatgcaaccttcactttgataaactccttcaacccttttcccggaagcacggtgacatgcctcaaactcggcgatatatgcaggtcgatttagagggatcccccgggtacgagtccgaatngtata

SEQ ID NO: 4626 - DNA, 826 bp, Glycine max
gtgtgagcataagcaacacgggccctgaaccatgcagcaggctctgaaaatgttgtcaggaaccatttgtggaaaacaggaggaaacattggaaggattttgttctttagcatctcatcctctggccttttaccttgacattgatcataaatttgtttaattagaggattagttttctgcctatcaaattttccacatgtaatatatatgtcttgaagaatttgtcgaagtccacgagtgtggggcacccactctaccatgccacagtcctctgtcagaggaatcacagcaaatgttcgaatatagagcttccttcgtcgactctcaggatatttggatagcaaccggttgatcattgcagtgaactccatcatgcgagcatctttgcggaggtcatccttcggtttgcaaagaaatgggtgctcaagaccatcactgcctaatagaatgatctgaaatcaaaggcatttatcaaaaagatggtgcatacaatacaacagacaatagtggcatttatttaattggtgggtttattggcaagcaagttctttagattagacctgtccagtatcttaaacaaatattttgtttaatgtataaaaaggattactctattaagtattaagtaaaaaattatctaggggtaggaaatcagcactgttaatctttgcaatgagcttgtaaatacaaggccacattcattttatagtcttgtttgacatcatgatcaattattggaatgcaaccactatcatctttatccaaaattgggtaattactataatcatgcatcatcctaatccatccatgtagtacttatccccag

SEQ ID NO: 4627 - DNA, 841 bp, Glycine max
cttgctgcctgcagtttcaaaatccacggttccttcaaggcgggaagcagcagcggaaatcatacaagctgctcgtaaaggtttcagcccaggaagtaaggagaacagtttgtttgttcaatttactaccctgattgatcatctgatcaagttatgcttccatgctggccagtcaagagcaaagacaattaatctctcaactgaatttagttctctaaagaggatgatgcccctgggaattataatgccaattcaacaatctcttactgttaatcttccaacatatgatgggaatctgggtgattcacgtatgtctaatatcttttcctccacagaccttcctactatatcaggcattgctgacgaggcagagattctttcgtctcttcagcggcctaagaaagtatgttaacaattttctacctttccttaattttttgtctgattcttgaataagggcagttcgcttatttgatgcagtgtgtggtatagcactgtttttggtttccacataatttcaattgagcgggcatcataactcatttaagaccaaactgtggtattggtactgcttattgtgttactttatttaaatagcatcaattaatagtaatttaatggttggatgggataatctgctaatgcatgcatttatccttaagtttttcaaatttcatggaagaatggatatatcatattagaggaaaattcattccaataggaacaattattgtgggtagtggacaacttgaaggggccaattgggcagtagtgtgaaggttgtggcctgctaccagcattagttggtctctactaggggaaagtggctgggcctggggtt

SEQ ID NO: 4628 - DNA, 811 bp, Glycine max
attgatcaactgatagctttttcttctataccaaccctagccaaaaaaggtttatgtagaaaagtatcagcatttgaattcaaaataaggtaactctagtcatgatccaatctgaaagaaccaacaatagaaatatcatgagccattggagggttgaaggtagcaaccccatatcatgcattagcaaacccacaagaaaagtgaaatcacatggctgccaattttgtattgagatggccaaggacatctaaggagcttggggtttgccccataagccacccttgtctcctcagccatctgcaactccaaagatattgattaaatgattagagataagaatgctagctcaccatgacataagtcatgataggaaaagttactagtaaatatagctgaggtaatgccagaaaggttacaaaaccaagttgctgtcaacagggctgcaaaccataaattgagcccatgttatgatattatgtaacaattcatgcattgcgctagcatctaccaaatgatatttcaaaatcacaaatcttcagttttacatgagtgaagaataatgggaccaaaacccgccatttgaatgtatatgtaggcagaaaaaattatcagcaaggttcattacctctggggtgtctgtccaatgtgagatgccttttaagagtagaggcatgtgtgcaggatacaaccaatcaaatagaaatccatatgttcggcggctaagaaatacaaatatgaaaaacagagagatcagtttaattccttccctcagcttgaaaaacagaaacagcacaactaccaacctgtttgt

SEQ ID NO: 4629 - DNA, 658 bp, Glycine max
agaaaggcctgaccccaataatgaagaggcatagcagcctgagataacagtgccaaccccatatcaactatgtgcctgtgttttctttctatcaccccattttggtgatgggtatgagggcatattaatctgtgctgaatgcccaaatcactcagaaacttggtaaagggtctgaattcaccaccccagtcagatttcacagcttcaataggaaagttaaactgagtattcaccatagccttaaactgcttaaacacatccagagtttatgacttgttgttaagtagataaatccaggtaaatctggtattagcatcaacaaaagaaacataatacttggtaccagtactcgataaaaatggtgcagggccccacaggtcagtgaaaacaagttcaaaaggactagaataggcagatagggaaggagaaggcagtctatgtgacttgccaagacagaaatgggaaaagaaatctgagatattcttattgattgttgaaattttacagatttgggatacatgtctcaagacatcaacactagggtgtcctagtctagcatgccaagtggcagcagaaaaaggtttacaagtggcagaagtgcccacagaagtattattctgagtactatttacagaatcagaactagaacttgagtaaa

SEQ ID NO: 4630 - DNA, 1486 bp, Glycine max
tgttgaagtgactgtgcctctttcatgtccattgtgttcggctctgtgctttttgacctgatatagctttccaaatctgcaacgagtttattcatctgtgaatacttctcttcaagagcaactttagcatctatcaacttcatttgaactcgttcttcacgccatacttctgccatctgtaacatcttcctctcctcttccacttcttccctgagtttcatagattccctcttcaatgcttcaacttcagccttgtcttctccaatttccttggcaagctcatcacacacttcctcgatcaattctctggccttcctttccttctcataatcctgcatgtagcgctttgcagagagtttgacatctgccaactcattaaccaacctcgaattgacaatttcaatcctctggcgatttttcctttctcgattcaactctgctttaatgtcatcaatgtatgcgcggattttctcatgctctttgcttctccattgggccctttcctcactgactttcttgagaaaatgctcaagcttctttttggaggagtggtgttcagtctcaagttcctgaattcgtgttcgtgcctgctctagttcagctcctagagcagatacaacagatacagcacttgccttttggtcaagatgtttcatgtggctgtagatatgctgcgctccctctgatgtttttgaacataaaggatcccattttgttgcaccctcccatttcattgttgggaagctggaaactttcagggctgaatagcatgaagtaggtttaaacttagcactttaattgtctgctctttcacttttagagtagaagcataacactttttaaaattctttgctcatacagacattgtaaaagctaatttcaccatgtaggtttacaggaaaaatgttttatccaagccatctctatacagatctatactgttatacatagcatgggtcaatacaacaatgagcataatttgtttcaaagttcaatttgggtggtatcaacccatataatatgcatgtgtctttgcacgggcaggcctttgaaatattactaaaaatttccataatatgaaatcataaacaacgtgttgctatgattatagtttgtcactatctataacttaatgattagatgattgatgtcattttcacaaagatgattaaaacaggtaatggcataactgagcaatgggatattggagatcattgtgcagtacaggttgcagttttaacttgagttattacgtgtatatgacattcagtcaataatcttcaattacaataccgaagagctgtaaaacttctaatggttatattatattgatattgaagtagtaagaaaaatcatacctcacagaagtgtccattccttgtaccaaatatggaacggggactttgagatgaattcttcttcagatcagaaccatgggtcatgccattaggatgaccaagaaactggagccctgggtgaccaattc

SEQ ID NO: 4631 - DNA, 740 bp, Glycine max
  misc_feature (672)..(672): n is a, c, g, or t
aagtctcaattataagcatctacaacgtcaacatttgttttttaaagcaacattaaattttttgaaaggattcacattgtcgaagtcccgatttggctgctgcctcgtgctactaccactatttgaccggcgcaccactgtatcccatctatttgcacagtgcaacaaagtattacacttgatgggaacaatagagagacgcaaaagaatttgcttgcacggtgacctttcaatctaagccattggtttaaaataaaataaaggatccagattaagagtaagttttaaaatttactcttagaatcagtggatctgttatgtataatttctatctttatcaagtgagtgaatgataatttagtaaataaaaaaacatttttaacatatattttgattaaaaatattttaaatcttatagtaaatattatttagtgatattaaattaaataaactaaattatatatattaatacaagagaggagacacgaaacctattgaattagtggagtgatgtatacatcacatgtgagaggaaataatttatttaacatgaaaaaaattattcaattctttccatatttaaattttgtggcctacaactgttgcacaatacaaaatagattagtcaatgaaccaatatgttaaagagatcataatctttttgatcagaangagaaaaaaaaaaagaagaaacccttttataatgcatcttccaaagataaaaaattaatttattctac

SEQ ID NO: 4632 - DNA, 745 bp, Glycine max
  misc_feature (508)..(508): n is a, c, g, or t
  misc_feature (534)..(534): n is a, c, g, or t
  misc_feature (565)..(566): n is a, c, g, or t
  misc_feature (658)..(658): n is a, c, g, or t
  misc_feature (690)..(690): n is a, c, g, or t
gtgaacaatagcaagggccgtaccagaagcaatgtgttttctgatggatccagtagttggcagagatttgtgttatgtgcagtttccccagagatttgatggtattgatcgtagtgatcgatatgccaatcgcaacacagttttctttgatgtaagtttaaataaaatgaatatttttaaaacttggcagacattgtagcctcagtctggtagaaatattggcccatcaaacaagcattcacaactttatgtgttttctttttgtgaatgataaaaaggtccaattaattgggaatttatctgcttctatgtcccgaaattttttctttgttaacaatattaaaatggtggcataacttgtatgaagtaaaaatcatggacacaaaacttactgtagtttccaaccttgatcactttcaggttaacatgaaaggactggatggccttcaaggacctatgtctgtgggaaccggatgtgttttcccttgaccagccctttctggcttcngtccaccttctatgcccctatttccngaatcatcctcctggtgttgccgcccctccnngggccccccccagatgtctccccgctttcttgcgatgccccgcgggtacgaccctgccgctgccttttctatccttgggcgcatgcccgtcngccccgtccattttgcccttcccttttttttncccctctccggctctttcctgcgggcaccccctcctgattaatttaaaatacaaa

SEQ ID NO: 4633 - DNA, 1462 bp, Glycine max
gcttgcatgcctgcagaaggtggatgtcttcggtctaacagggtccatggaatgatcctgacatcatgaaggtaatgtttctttgtatatcttgtttcttagtatttacatgcctcagcttatgaaaatatacataacttggaattgccttgtcaaactattatatggccaactaatgttggatattctgatctgtagctggtacataatgaggaggcaacatttgtgaggcaaatcaccagaatgcccaatggtcaacatacatttgactcctatcaaattccccgactgaaggcaagtattggtcttcttgtcattgggaagttgggaattcacatgtgtttactttatatatatggacttttaaccttttttttttctcatctcccaggaacgaatgcagtgatacatcaacagccgaatcagggtctgatatgaatgattactcctctcccaacagacacaggagctgtccttgtcctcatttagccccagttcatgaagaagtcaatttggaaactttgaatctgatttatttgagatccctcattcttgtctttacctgcaatctcattacctgtggttgtgtcttgagcttttaatcacacctaacactgtatcttatgtaggttaaagcaccagatctcaatggctactacagttgtgatgatagtgctctagcagttgagaaagtgattgaaagtgatcactttcaccttaatcgagagcagccattgcaaactaatgatatagggaatgttgcttgtagaacagattcaggaggtattgtcatgaaattgttgaagaaataatatttatatgctatatggaactcaagttgcagatataccttgtcatatttgaatttggaagttggaaactcatggtagctatcattcatgctaggtttaactgatttcattgacaagtatttcggtagtgtccttatttgctgaactcacgctacttgattttttgttaggtacttatgtcaacagttggttcagcattgttaaggaaaaagtagagaaaataaatgtcttatgtgtggcaagagtgatgacatttttcatggaaaaactagttacactcttccgctatttaacattcgaattttggagaacacagaacaatgttcacccatcaattaccatggaacataacattaataactattcagcaactgttgaaacagcttctgaaagagattatgttcttccatgtgtacaacgtcttcagagactagaaaaagtctttgaggaacttaacaacaagcctgacggtatgcctcaggaaaaggagcaaatgcttatggattccatggataggattaaatctgttgagtttgaccttgagaagaccaagagggtattagtctatatgttcttggtcatgtagaacttttgattatgctgatctgataggatggtgtttaaactttgtgcttttactgtaggtgcta

SEQ ID NO: 4634 - DNA, 843 bp, Glycine max
acctctacatcgacctgcaggtacttcaactttctgcatcacaatagagctagctgccttggcctcacccacatcaactgtttcagtgaggtttccagtaacattagcaggccagccaccagcttgttggtgatcaactgcctctatgactgcacttccaatctgagttcccttaactcttgtttgttgcatgtttgtttcatgtaatgattcagccctgttggcttcccccaactcgcttaattttggtatttcagcttctggctgatttgctggctgcgaagtgacactctttagcactccctttgtttgatcagaagactgagatttggctgatttttgcttcttagatttcttctcggtagcctttttgggttcatgagcttcaatgcttcgtatgtctgctggagagggctcggatactgagatgtctcttccagaatgttgctcttgatgcacaatatccaatttggtcttcacctccataccaggaccactcacaggcagtaactcaatcctgttagatccagctgaagatgaggcaatggtgggtgcaacacactgtagatgtccagagttctcatctggcttagaaattgaggtcacgacaacatcaggcgtaaaattgctaggtggcaactgctccactgacttagcagcgtaatcagaaacagaatggggttccagcccaatgtgtggttcctctttgggtctgttctgatcaagcaatggagagcactcaacaagagttgatatggggaaaaatttcattctgatacttttcattaatttgttcagtaagactaggggccccattttctggactagtagccccaaataatg

SEQ ID NO: 4635 - DNA, 1453 bp, Glycine max
tgctcgagcatccaaaccagatgtaggttcatccatgaatattattgatggattggaaaccagctccactgcaatggttagtcttttacgctgttcggtagacaagccactttggccagggatgccaactaaacaatcctttataccatcaagttcaattgtttcaaggacttcttcaacaaatttctgctcagtagatatacacagaatttagaaagttataaaatacatatgttgtctgggaaagagaaaccacggtgaaagtgataaggacgtcataccccttttgtgacagaatcaatttctgttggcaaccgtaaccaagctgagtatgtgacagattcttcaacggttatatatggagaatgtatgtcattctgctcacagtaacctgaaactctttcaaatgtcttttgcactttggggtatcctccgattcttatatctccttcaatgatacctccagtttttcttcctgaaagaacatccatcagagttgtctttcctgctccactgacccccatcagtgcagtgagaattcctggcctaaatgctcctgtgatatcacaaagcaattgtagccttttctcatcggaaccatgttttttcatctcctgttcagaatgacagtgttaaaaatctaaattgacaacattgtcaaatgtcaatgacctcaaatcatgaaaaacaagataggtgtgctttttaccggaggaatgtcacaaaaatactggacgtccttaaatgctattgacagtggctcaaagggcaagaccattttccctgcatgaccaaccatgtaaaagataccaaaattccttactatttttgcttgaaagaaagagctcttttttgagataatttatcatagaagctttattcacctgtgctttgattttcccttgggtgtgtggccaatatcaacagtaactgactttagttccacactattgcttgtttctcgttcccttagttgagagagcctctcttttgagactaaagctcgagacatcttaggctctggatccattccccataaattcagtggattgaacaaaataatataactgtttgatttgtttccttgtattaacttagacagggcttacgttttatgtatgataatgccaagacaaatccaaaatcaaatagtatggtgaaaccaagtagggctccaactgatagccaatagaagtggctgtcaaagtctaaaccatgactcctaagaacctccctcccttcagtgacatttcccactttgatctgcaaataaaaaggaaagtaatatagatatatacataagactctgacctatcatgaagctgaataaataattgtcttagaagataccttttgccagcgaggagcaagaaattcatttagtgttattcctatttccccatatgacatgggagaaagccaaaatccccacctcaaccaccgtggtagtgat

SEQ ID NO: 4636 - DNA, 706 bp, Glycine max
aataaatgtatataaatagatgtataaataattattatagtataaaaatgaacaatatatatcgtaaaaaattttatagactattaatatatataaaacttatctaaataacatcatcttaagcttaacccagacatccccacaaaggcatatttcttttcattatcatgattttccacttttgtactgtgttttacagcgcattatggttttttggttccttgtaatgatgatacgaagtaacatgttatttcataatggtatgtaaaagatcgaatctctcggtgtttcttcaagttcaaccattcagctctataatctctattaaaaaaaaaaaggtgtcatgcacagtaaaccgttttaaaactttgtttaagtagctgcatggatatgcttatgtattgtttaagggttggaattttgcttgtatttttatactttttggcttaaaaatttctacccacactcaaaaagtataggcttcctttttttttttttgtctaaacggagacttatagtatgccttacaaggaagagaagaattaaaaaaaaaaatgagaaagggttcacattacgagaaatcaaatttgcagacttgcaatttatatctaattaaataccttaatcaattaaactacgcttgattttttgttctactgcaaaatatgttttgaatgtagaactatttgcatatttaaacatgtgg

SEQ ID NO: 4637 - DNA, 885 bp, Glycine max
gccctgccagaaaataaatattccatcttttaagtctcatcatgaagttcacaatctagatatttgctagtttctacagtagatatccatatcatggtgtcctaaaatgtggttcatttgtaagttatttttcaacttgctatgaaatcgtaaccggctaggttaaacttacccgattgtattgaatcttgcatgtgtccaatgatgtttgtgaaagttcaagatatctttgcttcaagcaaaacaacaaagtctcagctctctcagctaagatgtagtttttgtcacttcggtctgtgtccaccatgagatccttaactttgttccatgatgtttttgaatggctcagacaagcttttcgcctccaagtgaacatcgaagactcaaccttatctgccagctcaagtgcttcgtgttcagaacttattttgagacaatcaagaaggtgatctggtgagaacttgtctgtagaatacatatagcggtaaattgtgtccccaagacttgttcttccactctaaagttaaaaaaaagagaaaaataagtcagataaaattttagaaaacatgaaaacatactactcaatgtgttctatgcaaccaaattgtttgtagtgatgagtgatgaccactcttggttttactttcatgtaaaacacttaaagcatgtttggtttgcagttgcaaaattacgttcgaggcaaaagtaattccttttgtgattaatttcaaggaaataagcataagactaatagaggatttcattgaatttacattttctagcatcatatatgattcaatgaaattatatcatcctttttctgtacaagactcagctacaactaccttgccctatgggcaacttaatggaatcctgaatcacata

SEQ ID NO: 4638 - DNA, 857 bp, Glycine max
aacgccatggtctaggtcaattccacattctcccatgtaaatcccaccagcataaaacatggaatgtccattatttgcatcaatggaaactgacacaggttggtgccacagctttctggagtgcctcctcactataggaaggaactgtctcataccccttaatttgagccactgtggaagctgctatggttgtgttacaagtcccattaactcccttgtaggggtagttagcctcagtggtgattccaccatttttaataatgaattcaaacccatcttccatataacccccttcacaaattaaccttggtcttcaccttttgtgtcacaagacactagctcttgctctgagagggagaccaggtttcctgtagttatttggtggatgccctcagttgctgccacggttgaaaatgcccagcagctccctagtttttcaaacaaaatgagcatgaacatgatccaaatcgtttcaatatatacaatgactatgaattttaattgtattttttaattttctacacgtgtcttctatatcagagataatcttgttccaaaatacattaaaaaaactttatgtgaacacctctcagtgagtatttgaatattattgtgaataattaaccttttttttagactcaactttcatttgtaatttgaattacttaaattatcatccttacaaatatattttttaaaattattctttctctaaaaatatttgtttatagcttaaaagttataaagttaaagtatttttagtcccaaaactatacgaattaaataataaaatcattttatctattgtttaagaatatgcatacatcttatataaggaaatgattgattatatataa

SEQ ID NO: 4639 - DNA, 816 bp, Glycine max
  misc_feature (791)..(791): n is a, c, g, or t
  misc_feature (794)..(794): n is a, c, g, or t
acaaaccttacaagcttggcgttaatctctttgctgaccttacacttgaagaattcaaggatttccgttttggactcaagaagacccatgagtttagcataacaccatttaagtatgaaaacgtgactgatattcctgaagctatagactggagggaaaaaggagctgttactccaatcaaagaccaaggtcaatgtggtaagatcaagaagatcatataagtacttttttgtgctccatcacattatcattactggctttcctcggattaattatgtgtgtcttttgaaatatttctgaatctcaaattatttaatttgtcaccttaatatttttatttattaatttatcaacttacaatatattaattactcctttttattatgtatttactgccacaatacatttatgaaataaacatatcttagtgatacatataagattcatataaaaaaaattagaataataaaaagtaaactacatcaacacctcttgagatttgtgtaattatacaaatattttttgttttcttaatcattacatttatctttttgatagaagatgtcaatgtaagacttaaaagagatattaatgtaatgttttcaaacttaatgggttagagtagaaaaaaatataaagttatgggtaattttatcaaagtttatcgagaattatttatactttattcattctatatataatcaatcatttccttatataagatgtatgcattatcttaaacaatagataaaatgattttattatttaattcgtatagttttgggactaanaantacttaactttataacttttaa

SEQ ID NO: 4640 - DNA, 765 bp, Glycine max
agctgtctgcctgcagaagcagcatgagcctgcaatatacaagtaaaaaatgatggagcagattaatgagtttcttaatgtaaatgaaacaagttgttaaagatcaagaaaatgaagatttgtatttacacagacagaggtccaaaaataatggcactaaacagcagatccattaattatgaagagagactattagggtagaagaaccctaatatctcaaagaaactactaagccatattcaactgatgaaaagtaataataatatcagaatatccaagatgttaaaaaatgcataacccagaaaattcaccccagccatttaacttaaatctaaatgtctaataagaatgagaaaaacctctgcacaaggccttaagaaaactgagtatagtaatagcagtaattactagttttcatttaccaccagaacctataaacactaaaatacatgaggtaacacaagataataactgcatgagattgctttgatcatgcgcaaccaaactcgatcatttaattggactaaaatgtcttatctcaagcaaaatgaatacatgatcaaggaaaaaagaaagaacacaaaatagcatatagtggagctaatttatagagtccatcttagcacagtatgaatgagaatatgcaatgtcacaacacaaattttgcacattattagaacaaaaaaaaaaacatgacctgatttattacaaaaggagacaatgtacctaatccagataaaaagcacaacaatacaaacctgtact

SEQ ID NO: 4641 - DNA, 836 bp, Glycine max
agctccacttgcaccagaactccttaatgcttttgaacataagttccctggcgttgctgtccaagaggttggtacatcattcatctatagtgatagtgttgctaattcaccgagctttcccacttcccacttctcaaaatttcatgattttgttttcctttctgttcctaatttaaaattttcatacaagtctctcatgaaatattttcaactaaatggtctctatgttatgagaaattattgtatggtccagcattaccaaatgtctataatctcagttaatctccatgtaacacataataagttttatcaattcttttttgtaaattaaaaaaattggctaagtgtgacatggaggatcatacaatacaataatttcttccatgttactcttctgtcatgagttttccatttggtctctttaaaatggagtactaaatgaaaaatttgtcaaaagaaaatgaaaaaacaaattgaaaactacaagaaacattcggtaataactaatgttttatggatggctcatttagaaacaaattaaaagagagaataaatgaaaaaattgtaatatttttgaaagacaaaaactcaatcaaatatttttaattatgtaatttgtatgacaaataatgtgcatatttagcatggtgtatcttccttaagtgttagtttttctttgttaggcatatggactaactgagcatagctgcatcaccctcacttatgcacaaaaggattgggaagtactcatagaaactcagtggggttcatcctcccaatttggaagttaaagtttgttgatcctgacactggtcgatcccttccaggacacacct

SEQ ID NO: 4642 - DNA, 1386 bp, Glycine max
acttgctgcctgcaggctgtatatttgctgaacttcttcttcgtcgaccttttttgcaggtaaaaatgatttacatgattgatattctgaagtagatgggttttgacatcaagtgtggttcatttattgggacatgttatccatttaactttatcaactagttgaaattaatttcttgcagtctgaaaatcctaaaccattctaagctgttttaaccgagcttgaattagctctgaagcaatagtctatggtacttgtatgcattgatgactgtttattgggcttccatttattcccactctatattttgtgaatagctggttttaatataatttccaagatttaaaagtaattcattgcattggctgcctttcttcatttttattttatacttacattattaagcttgtttcttatggttttttcatcagtttgttattatcacttggtagggtacaagtgacattgatcaattaggaaagattttttctgcatttggcattccaacagctcctcagtggcctgatatggtatacctgcctgattatgtggaataccaatatgttcttgccccccctctgcgttccttatttccgatggcaactgatgatgctctagatctgttgtcaaagatgtttacatatgatccaaaaactagaatttcagtgcagcaggcactagagcataggtacctgccttcagcatcccattaatacaccaatattattttttctccataattaatctctcctcttccactttaggtacttttcttctgctcctctgccttcggatccagacaagctccctagacctgctcccaagagggaatctaggacttctgatttcaatttacaggagggtcctactgtattatcacctccaaggaagtctaggagagtgatgccaggacgtgatgggtttgaaggaagttctctgcaagcagataaggttgatgccagttttggtgatttcaactgatgataatacaggcaagaatgaatcagctccaatgtctgtagaattttctatctttggtttaaaacctccaaatagacctacaattaacaggtacaacagtattggttgtctaatcaattcaaagtggcctaatagtttgtaattttaactgagtcaaacataaaattatccagctgagttcattggcattggaagaaaaataagccaggcttatattgttaggatatttttctagtgaagttgctgattagaaactattgtaatatgctataacacgatatgctgtaatgtgctaaacataatatgttgtaattcccaagtagtggaagaatgtgccagttgtttgttatcttttagtttctacatgtaaatgatgttaattaaccttagttccttgtttttgtt

SEQ ID NO: 4643 - DNA, 855 bp, Glycine max
  misc_feature (815)..(815): n is a, c, g, or t
cagtttgcatgcctgcaggttaggggaaatttcaaaaaatatacacattcatgctaatgctgaagtagatatagcatgaagcttatctaagtagaatctaagatgccatttggtgcctcataatttcacagcagtttgtcaattttgtgccaaattctctgaattggatattgcaatttgtgctttcagggaattggtcgtgaaagggtagagaaaatggaggctcgattaaaagaagatatcctacgagaagctgaacagtatggcaatgcaataatggttatccatgaaacagatgatgggcatatatatgatgcttgggagcacgtcacttctgaaatgattcaaaccccacttgaagtttttaaaagcctggaggctgatggatttccgattaagtatgcacgtgttcccatcactgatggaaaagctcctaaaagctctgactttgacactgtggctttcaatattgcttctgctgctaaggacactgcttttgttttcaattgtcaggtagtttcttcatcctttatctcctcttctgtattctttgtggacatcttcatttatatttctgtctattggttcttctcttgcctagtatttctcttttcgtcttttactgctaatatccctttcatatatcagatgggtaggggcaggacaaccactggcactgtcatagcatgccttgtgaaacttcgaattgattatggaagacctattaaaatattgagagatgatatgacccgtgaagagcggatgggggtttctcgggtggagatgaagttgggggctatgttactgcattactnctgaactttgcaaatatgcctgacgagaaacaaatcatgc

SEQ ID NO: 4644 - DNA, 1564 bp, Glycine max
attacctcaattgtggcctgctccaatttcctttctgctatttaggtattcctattggagttaaccccaaaagaaaggtggtgtgggatcctataattaggaaatttgaggctaggctgaacaggtggaatcagagaaatatctccatggctggcagactcactcttattaatgctgtcttaactgcactacctctgttctacttgtctttttttcagggcccctaaagcagtgattaataggttatctgccatccaaagacaatttctttggcgaggtaaccaacacgggaggaaaattgcttgggtatcttggacacaatgctgtgcttctaaagattttggaggattgggaatcaaagatcttaacacccttaataatgctctcctactaaagtggaaatgactgatgtttcatcaaccacagcagttttggaataggattttgatctctaaatataaaggctggagaggattggatcgggggcctcaaaaatattatttttctacctggtgggctgatctaaaagctatcaatcaacatcaggacatgattgctacctctaatcaattctgctggaaagtgggtaggggtgatcaaattctgttttgggaagatgctttggctgatgatgggattcccctcaaagaccaatttccagaactataccgaatttcctctcaaaaaaacctcattatggctgatatgggatccttctccgaaagtgggtgggaatggaatcttccttggagaagaacctgtttgataatgagatgggaatagcttcaaaattcattgaccaaatctcagcaatcaggttaaatagcaacttgaaggacacctgggtttggagagctgacactaatcgaatcttctctaccaaatctgcttaccaagttttaaaagatgagcagccttctgaagttcagtatttggcattccatcaactctgggatattaaaatccctccgagagccttgtcctttgcatgaagattgttatgggatagacttcctactaaggataacctagctaggagacaaattcaaacagacagtgacctttgtccattctgccacagcaagcctgagtctgcatcccatttttatttttttttttggtcagcaaagataatatattatatataggagtaccagaggtactgaaatacataaggggggtaaccatggtaatggttccataatcagacaaaatagtctgaaaaggaaccactctatagaacccaaagaaaaacataagtaatagctaaagtaaacctctagtagtacaaaaaaattgtctaatattgctggaccagtaattaaaatgttctgtgaagcctttctcataattcctaagccaggtccaaagaatgaaaattgcatcttcaaacactttgtttgcatcgaaagatgcattagagaacactatgctattccttgtcttccaaatggaccaggttagggccagccaccagcccctgtggtgggaattcttatcctgggcgaaggaagtcagaatcatccattgtagaccaatggataatttcctccagcattcacct

SEQ ID NO: 4645 - DNA, 847 bp, Glycine max
agcttgcatgcctgcagttttttgttttcaggattgcgtagtaacattattgcctctttaattcgtaggtttggtcttcgattcgcgtgcttcttttgtctgattttcggttttctttgcgattttctgagtttttggtagctatggcgtttgagcaaaactccgttccagtggctcgggtggcggaggagcctctcgttttaccggcgactaccgcggcggttgctggcgcggtgccgattttctaccccgcgtctgtggctgatgctggcttggtcggagtggggtatggaaatgtggcttcggttggtggtggtggtgctgctgccacgtggtgtgttcgccctgctgtgcctgttcataatcataatcactctgtgaatcctgctgttgggttctctcatgctcctagttttactaatagggttgctactgctgctggtggtagcaatggtgttgatgtttcgggtagttttgtggctgcttctcatgggtatcctatgaatttgggaagcaattgggttgccacgagtaatggtaatggcttggatagtagtaatagtagtaatagcattagcaatattaatggtaatggtagtggtcttcaggggaatgtcaaagccattagcaatgctagtgatcatgttggtggtgttggggttggttccatttcaaataccccggcaagccagcggactgatccgggtgagtgaggagggtgggggatgaatttcggtttcgggacagaaaatgaagttgatgtgtagttatggggggaagattttgcccaggcctagtgaggggatgttgagatatgttggagggcatacaaggatcataagtgtta

SEQ ID NO: 4646 - DNA, 1432 bp, Glycine max
atatcatatcaagagagacgaatagcataagagacaaaatgtagcatggattgatatatttaagaacagaacagattaaaaaggaaactgtcacacaattataaaatgcgtaaataaaccaaccttaatattatgaaaaagtttatgattggaaataatggggtagttgctgtagctgccacgctgaaatctgttattccaccagcgaggaacaagtatatcaatggcattggggatgttgggtccaaacatatccctgagcactgccatagcttctctcaaggtctcttcatcagcttgagcttccacacgtttcgattcctcattagtcaatgtcaccactaacatattggacccaggatacgcgttctccatgtgctgtcaacaaatcaacaaatcagtagataaactaaaaagattttgatgaatgacccaagaaactagacaacttttctgattctgaataaagatttggatttcaatcattttcacttatcatacaagttcagatccaaaatcaatgcatcgttgcataggtttttagtattgacaagaatagaactaatatcctgtacaaaaattcaatagtccaaggaattagatttttaatcctccatcgtagaatactcttctatagtttgacatatgttatgttacctaatattctatatgaataagaaaccaatcatagctagtgtagacagtagttcccattaccaaactcaaacaaatgactccaagggaataccaacatcgtagaaagataatgaaccatttaatattaattaaccgtaacaaagaaaaaccattgctacaattaatatgatcataataagacaaatggaaataattgaagcaaaagtatttatacacctaatccaccttgcgtaaatcaggggaggggagggataatagcaaagctatttttccatatcaaacaaaagattcgttattatcaattaagtctagtatgttgaattacgacaagaataatagatgatattgaaagctagttttaaataaatccattatgaagttcagccgataattgactcaaatctggagattactaatgggatccgcattaggattctagtacattttacagggattgttattttacaaatatttaatgtttgaccagagtagtgtttaaccacaggaagggggtaaaaacaaaagacataatttaagctattttattgtaaatcaagataaaccacaagttaattgatagctagagattaagatgaaccatgtgacccacatgcacaacacaaaaattataacaaggtattatttaaatcctcagaatgccaaccattatctttggtttatactttaaatcatctaaaagcaagatacgtatgctcaatcgggttggtccctaaggttaggtaagtgactagtacgttcattggaaataaattga

SEQ ID NO: 4647 - DNA, 752 bp, Glycine max
tcctatagtcatcaaaaggcaagtcatgctaagtatttggaggcagatccactttgtgctccattttggtattctcttttgaataatgtacatctccactgggaaatacacagtaaggggccaaaatccaaatgctccaagaagtccccctatgtcattgaagaatgggaggagcattgatattacagtgctcaacattacatatattgtcctccaaaccaatctgaagaggttgagcctgtaggaatggaaaccagggattggaatttcaatttctttgttcacaaaatcactatctgggaacatacgcgccgcgtgtttctcaacgaaggcgaagaggggctggcagtaaacttggtatgaaccaacaaggtggatcactatggcagcattagctatgtcaaggagccaatatgggttgtagaaaccaaagccagtgagaaggtttccagggcttgcatctccaaaagcagcataaccaaagcaaccacaaagcatgtagaaaatgctggttactgcaacactgatgaaactagccttcttcattgtttttgactctgatggaggggatttcactgtgtcctgtttcatcacattttacaatatttcagacctcaaattctttttcactttttaataagaataaaataaagtccgagtctcatatacaaaccaacaaacaacaacaacaaattcttatctatttaggtgagctacatggatcacaggacaccattgacaccggtataaac

SEQ ID NO: 4648 - DNA, 832 bp, Glycine max
atgtctactaagggacaaaaatcacaagaaaacaacgaccaagaccattgtagtttattctttctaagctcaaagcatgaagattaaaaaaaaaaatagaattatagctaacaatgctgcaaacattgagaagaaatactgaaaaaaaaaaagtacagtatataaatagttccacttctagctcatgagtggttgttataaccaaggttggtttatgctttgccattggcctgagatgctccttcagggttaagctcatcccaagcttcaatccaagtgaccattgcatcagccagcttgtcgaagtaaggatctatctttgagagcttttccttgacttgcttggagagctcaatgtagcacttctgaacagtggtgcattcttttggaagaacaacattctggaagaatggaatgatgtcttcctgccagaatatgcctttgtactctttcctcaggttaacaaatgggttactggccttgctgtgatagatatagggcagaccagtcttgactcctagccccaaatgatcagtgatcacctgaaccatcatcatgaaaacatgtcaattgtttttctttccgctataaaattcatataactattaacggtataaaaagtttatttgcaacttgtttggacttatctcataataagcccttttgcaagtgttcaagaaaacttgtttagaatagcatatatgaaaacaattttatttccattttgattataaaaaacaacttatgcataagtgcttacataacaagtactgattcaataaagaagaaatgattgcttaattttaccaacttgctaagaggacttaaaaaa

SEQ ID NO: 4649 - DNA, 956 bp, Glycine max
  misc_feature (917)..(918): n is a, c, g, or t
  misc_feature (922)..(924): n is a, c, g, or t
  misc_feature (926)..(926): n is a, c, g, or t
catgcctgcagcctatatctgctgtggacattggatttatctattgactttataatctaatgtccataccttatatgatttcattaatatataactcttgctgcttcttttttttttaatcatatgattcagtgtttgattatttttatttttgtgacttaggttgccaatgatccatctggaaaagcgatcaatgcactcgagcagcatattaaaaaccttttgtgtccatccactcccttgttcttcaataccctttatgaccccttcagagaaggtgcagattttgttcgtggataccctttcagtcttcgtgaaggtgtgccaactgctatctcccatggactttggctcaacatcccagactatgatgctccaacacagcttgtgaagcctctcgagagaaacactaggtgtgtacaatataacataacaaattaacactctttatgaaccttctagctaaccaaatttactaagttatagaccaattcaaatttgattatgactattgcctttgtgtacaaggtatgtggacgctgttctgaccataccaaagggcactttattccccatgtgtggaatgaacttggcattcgaccgtgatctcattggaccagcaatgtactttggtctcatgggagatggtcaaccaattggacgcttccatgatatgtgggctggctggtgctgcaaagaccatttttttggcttattttcactttacctcaatattaattattgaaacacgtaaacatatttgtaatgctaaattgataaatactgctttttaagaccttaaaaatggtaaatagccactttttttttgaataaactgtttgaaccctatctaatggttttaatcaaggaaaaaaggtttttttcttttacaattttttcctcccgggttttttttnnaacnnntnttttttcttttttttttttgtgaaaaacca

SEQ ID NO: 4650 - DNA, 1537 bp, Glycine max
aagtttttttatgtatatatatgcgacttcaaataatctgttcaccaaaaataacaagtttgtacttttggctactaataattccttgtttttggtagatgctaggaaactcatttcaaaggaagcttgcaatcgtgaaaaatgggggtatgccacttatcgttgtaagtaatcttttctttgcttcctttatagaatacctgttttcttaagagtgaggaatgaccccattaaactcttttagtctgaatttccatattatttttacatcgtacgttttgtgtttcttataattaggagagaaaaaagacactactttcttatataaattttggagatagtagtacatcagaaagaaactgctgcttttctacaatgaatttctgcctaatttcaatttatagcttcatgaaacttgtaaacatgccttatttcttgctacatttaataaaattaagttaaaaaatgaactgttctgggttgactgaagataatactattgaattcccagtgttgaattcaatggtgtgaactccgtactgatccttcagaggggtatgggtctgagttggcaatggatataggttagatataacaaagtgctttaaccaacctgcgtctcattctcagataattttaatgtacttcatttattaatttgctccactttaagcaccttaatgttatatatggtttggatttgtgctatctgcttggttattgactatctgatacattatcagaaacataaacgaagagcatcagcaacttttgggggaagggtctagtggtgcaccagataaatccccagcgttcccgcagcatgtctgtcagtcctgatcgtgtttcgtgtgaggggcagatctccggcctttaatgcactagcagctaattttgagagctcaaatgctaggaacctttcaactccacctccaatgattagaaaactgtacccaaaatctgtggcaaaggatacagcacaactggtacctaaatcttcagccatagctcatcttacttctagttttgaaccattctcagcgctagaaaatttgattcctcagtcacaaaaaggtatgcagtagatgagtgcgttgatatttgatgctgttattattagtattataatatgatctgatacaaaatgttatttctcttctctggattgttatgaattgaagcgaattcagttacccccaaatcaaaccctgagacaagtgacaaggagggttctatgagcagtaggatagaatctcttaccattcaggaggatgtgaaagagggagaagctgaagatgatgaaggtctcccagtttacccatatgaacgtgtaaacacagcttctacagatcctgtagaagatattgacgtgactaaacgagaggtataatgaaaatgtcaagatatagcatcatcttgcctatcttctcatttttttcttttttcctccattctttggaaattgcatcatataatcaatctttcttttgctttaattctgacttgtttgagcttcatgtacaggcttatctgtcat

SEQ ID NO: 4651 - DNA, 1311 bp, Glycine max
atggctgctcgccgcatcgacgccgttttgctaactgattccaacgctctgcttgccggaattctcactgacaaggttacgatataaagcgtgttcgtgcgtttttgtgttttttgttttttttatttgcatgaaatgtttcgtgtcgtttacggttttctgtgtcgttttttttttcaggatgtggctactagagtcgtcacagaggggctgaagccggaggagacgacggtgtcgaaagtaatgacgcggaatcccatctttgtcacgtcggatacgctcgccatcgatgcgcttcagaagatgattcagggttagcttcgtaatcttctttgccaatcccatatttctaactgaatagataaatattaaataatttgatgcattttgcacataaattttacgatgcacgtccatttttagtgtgtttattatgttacattctcgcatcttgtggggccctgtgtctaaaaaatcatgtatagtgcattctaagttatttctgtttggaggaaagcatttttcaaatataaaaaaaatagtaattaaaaaatacacactataatgcatcacagtggtgtgtcttcaagccttagagttggggtcataactgtgttgccttgtactaacgactattttgctatgtggatttagaaagtgattaattgtttgttttctgttaatatatccttcctctcactgtgtgttgtggttgttgactttactagatgcaccatcttgaaaaacatgagatttttttcatttttaactgtaatctgctttctcctctgttaccttcctacagcaattcatctgaaccaaaaaaaaaatgatgtgtggttggggacaaaacctttacctgtcacctgatctagtacttacaggcacaattttattattatttctcttttttgggggttttctgggtcctattatcatggtagccaccgtttgtttctggtctattataaggttctctcttgtctatgttttcgtttctttttttgtttttgttttttgcacttcatgttttcttcctctttaactagttgaatatgtagaactgggtaaatgattttattagattctctgtttatacatcttgtttaatagagtcatagtcggactggaaactaattcattaagtgagagatataatttgactttttaactgataggtaaattcagacacctccctgtcgtggaaaatggtgaagtcattgccatgctggatattaccaaatgcctttatgatgccatatctaggatggagagcgctactcaacacgggagtgccgtgctgcaggcatg

SEQ ID NO: 4652 - DNA, 781 bp, Glycine max
aacggcactcccgtgttgagtagcgctctccatcctagatatggcatcataaaggcatttggtaatatccagcatggcaatgacttcaccattttccacgacagggaggtgtctgaatttacctatcagttaaaaagtcaaattatatctctcacttaatgaattagtttccagtccgactatgactctattaaacaagatgtataaacagagaatctaataaaatcatttacccagttctacatattcaactagttaaagaggaagaaaacatgaagtgcaaaaaacaaaaacaaaaaaagaaacgaaaacatagacaagagagaaccttataatagaccagaaacaaacggtggctaccatgataataggacccagaaaacccccaaaaaagagaaataataataaaattgtgcctgtaagtactagatcaggtgacaggtaaaggttttgtccccaaccacacatcattttttttttttggttcagatgaattgctgtaggaaggtaacagaggagaaagcagattacagttaaaaatgaaaaaaaatctcatgtttttcaagatggtgcatctagtaaagtcaacaaccacaacacacagtgagaggaaggatatattaacagaaaacaaacaattaatcactttctaaatccacatagcaaaatagccgttagtccaagccaacacaggtatgaccccactctaaggcttgaagaccccccctgggatgcattatagggtgaattttttaattactatttttttctaatttgaaaa

SEQ ID NO: 4653 - DNA, 892 bp, Glycine max
  misc_feature (16)..(16): n is a, c, g, or t
ctcggttacccggggnatcctctaggatcgacctgcacaacagaccactgcatgctgttggaggaagtaatactagattcaacggaaaggaatgtaaaacctatagagttggtattggtgcattcctccgtgttgattgcagattttagttaaatcaactgtctttttattattatcatagccatcatgctaatcggctcggatttgagattttagaaaagatgaaatgagtgttttttttttttttttttgctattacaggcttgcacccaattttgtgatgcacttggattttttaaatatatttaggtggagttcagcatattaaacatcatatagtattagagtgaagctcacatttttcattttttacagttgaacatcaaattggtgttcgtcgatgacaatcaaccctttaaaatataaataaaccatcattgtgctacatggtagttaacaaaccttatgcacgggatgcatacataacttgtaaaagaagggttaacaacatactttttttgtcactttttcattgcttaaagtttattaaaaattgcaaaatcaagagtcattaaatataacgtgtattaaaaaaatctgattttcaatcaattttatctacttacagattgcattaaagagtgtagtgtgtagtgccatatagcgtgttgttaaaaattttatgattttcaaataaatttggaccacttacggagattgtatagtgttagggtgtggtagtgtccaaagtgtgttgagggttaagtgtgcagtgtcaaaagggtgctgtttacattgtttttttgtgaagaaacagagtttataaattttgccccaatttaatatttaaaaaagaaaccaagtttttaaaaggaataggaaattttttcca

SEQ ID NO: 4654 - DNA, 1762 bp, Glycine max
aaaccggtcttgtatcaaaactaacacatttgaatctgtcttggaatgatcttcattcacagatgcctccagaatttggcctccttcagaacctggcagttttggatcttcgcaatagtgccttgcacggttcaattccagcagatatatgtgactcaggcaatttagctgtcctccaacttgatggaaattcatttgaagggaatattccgtccgagattggaaattgtagctctctttacttgctgtatgcatcctatttctcaagctctagtgtcatttcttttaacacatctttttggaatatatactaattcctatctattttatgcaggagtttgtctcacaataatttgactggttcaattccaaagtccatgtcaaagctaaacaagctcaaaatcctcaagctggaattcaatgaactaagtggagagataccaatggagcttggaatgcttcagagtcttcttgctgtaaacatatcatacaacaggctcacaggcaggcttcctacaagtagcatatttcaaaacttggacaaaagttcattggagggaaacctgggtctttgctcacccttgttgaagggtccatgtaagatgaatgtccccaaaccactagtgcttgacccaaatgcctataacaaccaaataagtcctcaaaggcaaagaaacgaatcatccgagtctggccaggtccatcgccacaggttccttagtgtatctgctattgtagcaatatctgcatcctttgtcattgttttaggagtgattgctgttagcctacttaatgtttctgtaaggagaaggctaacatttgtggataatgctttggaaagcatgtgctcaagctcctcaagatcaggaagtccagccacaggaaagcttatcctgttcgattcccattcctcacctgattggatcagcaatcctgagtccttgctcaacaaggcatctgagattggagaaggagtctttggaacactctacaaggttccattgggatcacaaggtagaatggtagcaatcaagaagcttatatcctcaaacataatccaatatccagaagactttgatagggaagttagaatcctagggaaagcaaggcacccaaatctaattgcattgaaaggatactattggactcctcaactacagcttttagtgaccgagtttgccccaaatggtagcttgcaagccaagctacatgaaaggcttccttcaagtcctcttctttcttgggctataaggttcaaaatcttgcttggaacagcaaaggggcttgctcatttgcaccactctttccgtccaccgatcatccactacaacataaagccaagtaacattttgcttgacgaaaattacaatgccaagatctcagatttcgggttggctcggcttctgacaaagctggaccggcatgtgatgagcaacaggttccagagtgcattaggatatgtggcaccagaattagcatgccagagcttaagggtcaatgagaaatgtgatgtgtatggttttggggtgatgatccttgagctggtgacaggtaggagaccagtggagtatggagaagacaatgtgctgatactgaatgaccatgtgagggtgctgcttgagcaagggaatgtgttggagtgtgtggatcaaagcatgagtgagtatccagaagatgaggtattgcctgttctgaagctagcaatggtatgcacctctcaaattccttctagcaggcctactatggctgaagtggtgcaaat

SEQ ID NO: 4655 - DNA, 1428 bp, Glycine max
aaattctaccctcctcaaattgggaaggtggtgatttccaaagcctttacaacgttgcttttgatcaagggcgaacagcatcttttccttctcagccatttacaggtagctacaaatttgtgacttgtcaaaatcacttttttccttagcctgatatcctaaaagtagaaagtagaagcaaagcagagtggattttcatgggtgatagagacccgagagccccacagattactgataagtcctttttccatcaaaatgaaggaattttttttaaaagggatcttttaatcattcacccatcaagccagttgtctattttatttgcttcttattacgtccctttctttcccccaactttcactcctacaaagtggcggtaaaggttttagctgcttgactcaatgcatcattcacggacatatatcatataacaaaaataataataaaaaaaaataaacggttcgaattgctatatataacaagttgttaagttgtttgtgatacaagacaaattttacttgtgaggttggaaatgtatttagtgaaataaaataggtataaagagcaggaagcttctctttttgaaattcttctaattaaggtctttggatgatgagccaaggatcaatcgttttcttgagactttttggccattactacacaatcacccttaatttaagcaatacaaaaatattggtgatatagaaagttgttgaactgggctacttctgaatgtgaattctaaaacaatgtgttgttttatgtctcttgcaggtctagttgaagctagcaatctaaagatggagatgtaaaccagatcgatcatccattataatttgttggtggattaggtcactcggagtgcctttgtcatgattttttcttttttcttttttcgagtacataacatatattggttgtatactgctccgtagaataaataagatcatattaatacctgttaacttcaatcacctgcatttgcacgtttaaagtactatatagatgataataaaaagaaaaataaaataaaaatgaaaaggttgatcgcgatggtcacatgtgtgaccagccacctaatccaatgggcataagggtgttgatggcaacctaccactgctttttcccctctctctataatacgatttttggtaaaacaaacgaaacactaactggaataataataataataataataataataataataataataataataataataataataataataataataatcacgtaattcttcggttgtcaattttttacaaataatgttgggggtatcttttatccatagttggttgatagaattggggtgactaacagtaatgttttaattcttttttgaggaaaatagatgctaataaatttttaagtaggcaacctaactcaaaccaacttcgctgcaggcatgac

SEQ ID NO: 4656 - DNA, 663 bp, Glycine max
gcaggcatagcaaagatttgtcctgcatgggggtgttggtgaagaggatgagggatatttcttttcattaggggggtgcaggatcaagatggaagtgtaggaagtaaaatccaaaaaactgtaatctaccacttccatctcagatctgccagaataggcccctcgcatttctcaatcgcatatactgagaccccaaacaatttattgagacccaaatgaacaaattttggggctcataaagaaaggggatagtttgtttgtccccacactcatccccctccaaaaaaaagaagaaaagggtcagttgataggaatctccaaaatgcaaaagagaacagttaaatagttaagcattatttttttaaaaaaaaatttagattagatgccctaggatgaagaaaaatgttttagtacattgtactatttaacatgtgtcactttaattatgcaagtcatttctatttcacatttaaactaaatttctagtattcaatctagttcactttttgtaatattctctctggacttatgtataaaaaaaatattatatgttaaacttaaatataaataaatttaaataatcttatcttatttaatgctattatttctaaaatatttatcttttaattttaattttaattttatttttaatgactcttttat

SEQ ID NO: 4657 - DNA, 1443 bp, Glycine max
  misc_feature (1429)..(1429): n is a, c, g, or t
aggacatgctgttttagatgatcttctaattccttcttattctttcactggggacacattatttgatgtagatacggtgcagcgaatcatgatgaattaccttcaatctgaaaaggaagatcattcaccatataatgcagatgatgagtatttttctcctcctcaaagtgatgcttattgggttggaaagttgatggagaattaccttgctgagatagccactgacagaaatttagctgtttcaaaattcatcactgttgctgaactaattcctgaccaatcaagagaaacagaagatgggatgtatagagccatagacatctatcttaaggtgaggttctaaaactaatactctcactagtgctaataatagaaactgattttctcctactgatataacttttattaaatccaactcaaccattgatattatctgcatgtgtaacaaattatggatgtgttttctgttagtacaggaacttacaatcacattttagtattttgcaaaacaacattagatttctgtcttctacaaagcacatacactaaggcttcaccacattggctttagattttgatttagttgatttgccaagggttatctaacttactccaagtaaaaatgagattaaacaaccccacagaagataattagttaattaagaaaattgtatcaatcatcttaaagtacataattaattctcagttatctactataggctgtttaacctcatttggggtaacactgaaacaacattgaacatacaatagtattgtcattgaattcaaggatttaactctagtattcttcttatgtaaaatatttacacgcgagtttatcatgaatactgctgacaaagtagaaatttaacactctcaggctcatcctattctaagtgacatggagaaaaagaaagtgtgtagcgtgatggactgccagaagttatcacgagaggcgtgtgcacacgctgctcaaaacgacaggcttccagttcaaatggttgttcaagttctctactacgaacagcaacgccttcgcgattccatggatagcagtgcaggctgggattctcctaacttccttgacaaggtaaattcatctcccaacgagctctccatcttgcgaagagaaaaccaagacctgaaactagagatagtgaaactgaaaatgagactaaaagagtttgagagaacttcaattagatcagcatcaagtagtcctgtgatttatgcttcacgctctgctgataagcctcctctgcctagaaagtcattcattaactctgtgtccaaaaagcttggtcgtctttctcctttttcacgtggcgatgctgccactatacctcccaaaggtcgcgtaaaacctgataagaatcgacgccattccatatcctaagaataagatcgttatgtctgcaggtcgatcgtnagaggattcccccg

SEQ ID NO: 4658 - DNA, 1395 bp, Glycine max
tgaaaattggttcagatgcatggtttattcaacttttattctttattttttttctttgaggtattttcaactttattacctctcatttccttttccaccctattgttgattgatcaaaattcagtaccatcctctcccaaggattaacatatgaagttagcttttttttttttttttttcccaaagaagaaatgtacgaatcttttaagtgaaaatatccatatcaaatgtaattaagtgaagtgggagcttgagagaattgtgagctatgtaaatgggcttttatgtgcttcttcttgtggctttgtgaaccctgggttttcatgtatttattcaaaatgttgttacaggcactgattttgctacctaccatgaattgtttgggattcatctgctgccagtatggaggtcgagagatctgttcttgttgcagttcttggatgtatatcatcatgtcctggactttctctgtgtgccctgcaaaggaaatgatgattgcaatgtctcaaatgcagatgccgctgatggatacatgacagttggaacttggaaattcttataggtttagaattagttgatcaggattgataacatttcaaattttcaattgtaattgtagttgctgataggtagattgaatggtctgaatagtgtaaaactggtaagggttggaggctagggtttgcagttgttagttgatggctgtgtgtcttagcattatcatctggtaaggaaaaatagtgaaatgaacatttaagaccttgccgagggaccacattggtaatttcaagctagtttttcatctccttaggttgatcaagatccacattgctgaattgaatattagtgatgggcttgccacagattcccccaaatgaaactgctgaaaaagttgcacttgtgggtgcagctttaactagctcaccgcagttttctgatgcaagtccctctgccataggcagcatgaacagtgtaaacactggtgggttggccgggtgtactctgggatcttcgtttgatgatttcccgaagaatgcctccttagaaatttcaaatgtttctgacagtacattttatagaggagccatggaagtcacttccaatgtccacagtttgaagattggttcagcagatagaagtactccttttgctccaaaaagtggacggaatgttcatattcctgcttcaagggttgttggttttgaatcgggccgaactaatacttcaactgatggtttgactgatgtttcagctgtaaatcttcattcttctgtttttactaatttccctgccaatgacactgaatctgccagttcattagtcaggaagcgacttttatctccactgagcagtatgctctccccaagtcatttcaaaggtgatcctcttgacatt

SEQ ID NO: 4659 - DNA, 816 bp, Glycine max
gtctacttgctgcctgcaggttcttgacggtttcatataaacactgactcactggggtgaattccaatcccaaatctttcagtttttgatttgaaaaagtgtagggttttgctctcggattcttttcatctgaacacctgcacgtgttgaaatacttatgtcactatacaaatgaccaaattaagcagtttacgttagctattcttcaataaattctataactacacatcttgatgtagtaataattatttagcaggccatatgtaaatgtaaatggaagaggtaggtaaaagattaaagatgagatctatcaggggttacactctgacaagtgacaaggacattggggttggtaaggactcctaagctccactcgtttttataactaaaatcattgaaatttttttagtcatgtataagtgggcgaccacataaacaattattattattttttttttacgagaaaagttggtatacctactccttctccaaaatgatgtttaatattctcatatttttactttactatacatctcaaatcaagaaaatgtacgctttcatcaattgtttttatcacttgccagaagaaaataacgagggtgtgaccacccgggcattcctggtgttaacacatatctgatatcattggattttgaagttcaataaaaatcataacattttttaataatcaaaattgtcatttactattcattaaaaggttaaaaaaaaagagagacgattttccatagctaaaaattttgtagaaagggatggggggcattggccaattgggcacgggaatttaaccttttacct

SEQ ID NO: 4660 - DNA, 847 bp, Glycine max
aaaaacataaaagaacaggaaaaaaaacaaaaaaggataagatttaatatggagtaaaataaccaaaacacatcaaggacaaccaaaggaaaaaaaagaggaaactggtaatacctaccaccgttttcagttttagccaaatactgtagacacttgaaaataactcttgccccaagtgagtaacctataagtgtcacgggcctgaaattcacagaccaataatagtacatcatctacaattttcttgaagctgaagtaaaagaaattctggcattagtaaaatacctatttccctgcaatccttttaacaatacttcagcgagcaacttaccagctttgtttgatctaaaaatcaagataactcagcaagtatatctaatctaagagtagacaaagacaggaaactgctgataacaaaattttcatggagatggtggaaaaaaaaagtagatactccttttataaagaaaaaggcgggggtagatactccttggaataccaaatccaaaccaccttgacatcagctttgtatgttaataaacttcaatatcaatgatcaattaaatcaatactcctagacataacttttacaattaccaaattagaacgtaatcatagtaaacttgaacatgatgatcaaaaagcaatgcaatcttcaaataataaattttaggattcttagtggtgaaaaagtgagagggcaagttctaatcccatagaaatagaaaataataattataataaatatagatgggattgaatttaaatatccatcaattaaattcaaggacaacttaagattttcttaaaaaaacttgacaatcttagattttaaagtaatataatg

SEQ ID NO: 4661 - DNA, 834 bp, Glycine max
tattatgaagttcattatagcagaactttctagaattgcattgatcattatctcgttttactatcaaccaataaatttttgttgcttaaacggccattcaagtttcaatgctcaatgctcaatgctcaaaagcgattggggctgtggtaggggtcacgtttgaaaatctttggtaagtaatctgtcagtccaaactctcaagatattttgagtaaaaaaatttcaagactgaatgaatgcacttgttgactcacctggtccaaccccaaccattctgttacgcactccaaccattcccaccaaacttataatgattatggggaaactagcacgtttaacaaatcaaaataattggatgtaagatacatagagtacaccaaacattcaattcacaaaggcactaattcagcaaaatatttcttcattcaaattaccacgtatcattttaaccttttactgatcagtttgccacattattactatttacatacaacttggatttggggaagcatttacaattacttttccccggccagcagcatcaagagtatccagagatgatgagaggactccatttgatcatcaaagtgatcatccgtatattaggtggctgtaatcagcttcctttgggctccttattgcagcataaaacaaaaactgtagttcctatgagacttgttccgagatcaatgggacaaaaaacacccaatgacacacagtatggcacaaacataaatctaattttatctgtatttgactatagcactaccctcttgtgtattgtgaccctcagtagattcttcctcgaattcttttattagcctttcaatctgc

SEQ ID NO: 4662 - DNA, 1480 bp, Glycine max
ttattgtattctatatcaaatcagacctgaatcttatagcattggagattttgatatacttgtactcaataaattatgtcaaattcatctacaagcctttattttattgacttatctattttaatgccatacacaggtcatattatttggacaaaagtatatttttggtaattttaatgccatacacaggtcaccttaataatctgcaaaataaatgcttgtattaaatgctagcatttttttattatcaaaatacaaccttttttttatctgaatcaaagacatataagaggatttataacaactcacgcatcatgtttaacaaactcaacaaaacctcagtaaaaaaaaaaaaattaaaaatcactttgttccatagtcattttaaaccaaaatcatcttttcaaaattaagtttacatacacttgtccagacacaaactaaaggccaaatgcaaacaattattttcagtaaaccaagatctgcacacaaaattgaccacacagattctcgacagtttcttagcaagaaaattaaaattcaaactagaaatgtgacagaagggacaaaatgattattaatatggtaaataaagttcatcatccttcttatgttgggtgaactggaaatccaatcccagcgccactctaattgggacccagaatttgcaacaaaaaactaaattccaatgtctagaaaacagttcttttcaaccaccaatcaagataactctatgtataagagacactatgaaactcattcttactgcttagcttccctccttgcaaaactattctgttttcagagattaatctgctaaagcaattatgaaaaaggatgggattaaaccgaaatgaggtgcagtatgcagatttccacatagaaaaattctcattataaaaacttcgtaccccattgcccagaggctcttcgctatgcgaaggtatgggggagggatgttgtacacgagaaaattctcattatataaagagaaaattttcttctagagtcaaatcttgtgatccacagcatgtgcatatttgcacacgagaaaactgttggaagggatgtatcaaaacctcataaaaggagacaaaccagaataagaaaatgaagtcaataacacaaactgtacacatccaagagaagataaagtgaggagcagtatttggggcttaacttcaattctagttgtccatggcacatgattgtgtggtcatagtagttcagtggacaaccaattggatctagaactttagcagctagtaacatgtgtatgttagttcaaaaatgattccaccatcaaaaaccaattttacaacattggttaagaaatgatcaagaaaattcaaggcaaaaagagccttatgtaagggagaaataacaataatttcatagtgtgctcagcaaagttttcaaatacaagaaaggttaacagctttgaattatggcaaggcattccttgagttccatcacctgc

SEQ ID NO: 4663 - DNA, 800 bp, Glycine max
tacatcacccttccattatatgctcttgttactcaggtactatatgcttttcgtttcctgattttcttgtatttgatcggagccaattttgaatgactaaattccaataattaattgctatcagaaaactgagagatgcaaatagttccaggttgatgaggccaaagctcataaagctcaaagaatagcaaaggacatccatgaaaataaccgatttgattaatatgatgaaagatacgatagtattgtttaaattctctatttatagagcttattagagactaataacaaccttactaactaatgttaacaattcctgattccactgaaacattcaggataaatccttatttatagagcttattagggcctaaccattcagatggtatcttacaaaatttggttttcacgatgcaatcctcatttacctttatacttacaagttactaagatttcaaggtggattaattgactatgatcatggtaaacacatgcagatgggctcgagaatgaaaaaatcaatatttgatgaacaaacgtcgaaggcgttgaagaaatggcacatggctgtgaaaaagaagcaaggagtgaaacttggaaattccagggtgcgagccctggatggaagctccactgcttcaacaatacactcttctggtcccacactacaccgatacaaaactaccggtcactcaactcacttcacaccaaactatgatgaccaagatgattaccattctgacactgagttgtctcccatttcaccacagcaaacttgatagtaagagtggaccatgatg

SEQ ID NO: 4664 - DNA, 877 bp, Glycine max
ttatacgattcggactcgtacccgggttcctctaaatcgacctgcagctcttacctcaaccttctcatcccaggtctaatcaacaaattcaagaaccgggaatcatacaatgtaagaatattgcagaacctacagagcctgtgtaactgaatgtatatttttctatttgttgtacttgaccagaaagcttatataattgggatttatgtaacacactttgaacatataacataatatacccaacaattctgtcctctacttgctccttatgagcctttttctcaagcacatgaatcaaagctagtaagcatgattttgagcaaggtgaaactttccaatgccggcaagtgttttaagaacaagaatatacaaaactgactatatcattatcaagtataacaatatctagaaagctctaaacaaggtcaagatatattaagtaaaagaaccaaaaatggttgaatagagagtaacttcttatgctatttcatgcttctttccaggcttgtcaaacgtaaaggcacctcttgattgttggctgttgggtgttcattttcttttgcttcttcctcatcatggtccactcttactatcaagtttgctgttggtgaaatgggagacaactcagtgtcagaatggtaatcatcttggtcatcatagtttggtgtgaagtgagttgagtgaccggtagttttgtatcggtgtagtgtgggaccagaaagaagtgtattgttgaaagcagtgggagcttccatccagggctcgcaccctggaatttccaagtttcactccttgcttctttttacagccatgtgccatttcttcacgctttcgacgtttgtcatcaatattgattttttattctcgagccatctgc

SEQ ID NO: 4665 - DNA, 880 bp, Glycine max
  misc_feature (847)..(847): n is a, c, g, or t
gttgcctgcagaaaaacacaaaacgtaccatatgatgtcatcaaccgtgtcatttgctagcaagtagtatatattcactgaagacacctaaaaacaagaagtagcaattcaaagaatcatcagaacatagattgtccttggcaactaaaataatcaaattagttaagcaatggaagaccttttcaatatggagatatctatcacaaatttttccagaaattgccgtgatttcttaatgttaccatgctagtactcttgtactgttatctgaactgtgggattttagatcactttctttttttttcctttctctttctactaaacaacacacaagtttgagaatacctggccaattctatgagcacggtcttcggcctgaattaggtcaccaggagtccaagacaattctgaaaagattactgtgctggcagcagttaaagttaacccaacgcctccagctttaatagatagctgtgtgaacatagaatcattaactcaaaattgaaccatattttacactaattatagtccaaactagcaaagagctcaatagagaaaacacaaataattacaaggatatatgtgaacaaaattatcataccactgctgccttgatagaatctttttcctgaaagtcagtaaccaattgttgcctggatgcagcaggtgtacttccatcaattcgtatgcaacccacttttttcttctggaaattttgaacagttctcatgagagtttatcatttcatgataacatgcataaaatttaagtggccttacaagaaaaaactcgtgtattgaaatcgatcattggcttgatgggtgtgcaaatataagaaacttgcatnctgcctgcaaacatgatgacgcatagcattacc

SEQ ID NO: 4666 - DNA, 768 bp, Glycine max
taagctgcctcattcactgttgttgcatgatatatgaagttggtgctctgccattccttgtttcttacattagaatgtaactacaaaatttcggaattgtgtttagcccttatttgagatgctcctacagaaaatacaaaaatgattgatttttgatatcatatgtggcttatctgatatatccaagcactgcaaaaaaatactgtcacatccttggttatagagaaattatagttataatttatactagtgttttaatttttaaattatataactcagggaactcagtctctgacctatatgttattgttaatgtagatttaattgcagagaaatagatgacaacgttaactcaacgattaagctttaagtaatgaaatggataagctcatactattccaagattagtatatttgattctttgtaagagcaagcattggaatttatcttcaaaatctagtaacagatagtgtaaaacttctttagactcaagagtttaatggctatgcactgtcaactaatcaaaagtcactgttagtaacttggtataactttaagattgtaaaagtcaacaaacttatcatacatgatgatttatgattggatgtgtgtaaaacttctttacattgttagtgcatagactacttactctttcttaaccatttttgagatcactaaaagtgtggattttggttagtgaaaaaaaaatggtattatgtctgtggccctctgggcaatgggcaatggggtatgaagtttttattatgt

SEQ ID NO: 4667 - DNA, 1314 bp, Glycine max
ccaaaaccaacaaataaacaaatatttgttaacttcactcttactttcttcaacaaatcgttagctaagttttcaaagtaaaaaaaaaaactacatatagaagcataagaaaacaaagcttatgcagcaaccacaaattcattagaataaaatggtgtatgaattgatagtataagctttgtttgataaatttgtttatttttacaacagtttccttaaaaatcatcccaacaatgatttttgactagtttataatgtaaaatttgttacaccaacaatccataaaaaataaatttgattgaatataaggagcaccaaaagaaagaaagggatgaaatgaacaaaatagaataaaatctaaatacagtttggatcaaatgaaagagtagcaaattgagatgaacaaagaagaaagaaactgacccagaaacgttgttattagtcttcatgtgcttttgctattgaagaagcatgtagtttggttccttcttcttgttgttgtttttatgttgtgtcatgtgtgaagcgttaggttgcaatttgtgttccaaagggtttaagaggggttttggatttttttattaagtttgcggctgttttgtttgggatgtgtgtgcatgtgctcactacaaacgtcattcttgacttgttgtctaaggaaaaagttgaagtgttcaatttacatttggaagagtgagatgcgaaattggtgggtttagatagggcatggtgacgtggcacgttttcagattctaatggcgaggctgatgagcagctggggttgcgacacgtggcgggatttgtttcatggtgtcaaccgcgcagaagctttcttcaccacgaaggggtccttttctatttggtcttggttcttgcaacacttcaattatgaattatctatctctctcaatctcttatttttttttccccctaaccccaacaatgtcgtttattttcttttacgaatttatttatgagtaatgctaataatatatcctaacatatttttttttaaaaaaaaattcttaaaaaaatattttttaaatataatttttattgttaactgaagtttacttaaaattatatttttttggtctcatcatttatttaatgaatttatattttgaatttataattgttagtaaattttaactaataataaagtttttagaatagtatattgaaaaatatgctatttagcactcctctttatctatttattttctattttattagaagttaatacgaattggatcgagtttattttcatgataaaaagaaaagtagtcagatcaatatgtttattttatagcc

SEQ ID NO: 4668 - DNA, 899 bp, Glycine max
acgaaaaaccagggggtgtcaaacagcaaaaataaaactaaaacctacgccttcttctccgcgagaactcctcgctgcaggcccgccgttcgtgacagatgcgtcgctgccggagctcgtcgccgccgtttgtgccggtgcgtcgctgccggaggtcgtcgcggctgcgtgcgcgtgcggctgcgggtgtcgaggctgggtgcgcgtgtggggtgcgggagggacgccattttccgccaccccgccataaccgccacgaccgccatggcgccgccatcccaaacccgccacgccaccgctattcggtggcgttttttcgaaaaaccaccatggcaccgccatggccgccatttaacaacactgcttcatatggagtaattttttcgttctcatgaatactactaccttacaagaatcatagttttacgtggatctggaaggaacttcagatcaataaatcaaatccatgtctagacgtgtaatgaaataattgacagaatattttgtgagagtacaaaattataaacatcagttgaagttcttggaggattttgttgtactgtttttagtaaggcaaatgatcacaagggtttgattttaagacatcctacacaccatgtaaaccctaagcggtagctcaatcctaatcacttcaagataattagttatgcatatgaaataactaaagatgatccctactcctaggggttggaggtgatgattattgatgaatgattgaatgacatggtgggaaaaatattaaaaaagttaagaaatggatagaatacattaagaaaaattcttggtatattcttatgattcaagttaacagacaggaactaaactagacacactcacactcatacatacatggacacaattataatttgtactctttt

SEQ ID NO: 4669 - DNA, 1372 bp, Glycine max
  misc_feature (1345)..(1345): n is a, c, g, or t
aaaaggctatcttgttgtctatgttggagatgagatgagacggtttgtgattccagtatcatacttgaaccaaccttcatttcaagaattactaagtcaatttgatcatccaattggtggtctcacaattccatgcaaggtaggatgagtttctaaacttcacttctcgcttgaatgagctataaatctattggagaatactagcattattttcctctctatagactcaaaataggcacgggacaaaataacttagcgtggaaaaccctttcaatgtgaaaggtaaaaaccacgggacaaaatatctctcaacttcatccaacaaggatgacttacaatttgtctcaactctcaccaagtgtggtgtaaactataactctctaacacaagatcagtcagagtcaggggtgggtgtttgtcaccacaaagcgaggactagcggaagcgtagtcccaagatcagaattgactctaataccatcttagaataaataatgtgaaaggcctaactcaatcccaaaagcttgctcaaggggtgagggttgtccctcacttatatattttagtgtagaattacttttagccgatgtgagacttggattatttccaacaatttcaatgtatgtctttgagatgaacatggaacaaagaaaacatttgttctgaaacagctctagacacatttttttataacacgagctcatttagttcctacttgcaacatcacagaataatcttgagttaatttgatgttctttcctattctatcatcaatggaaaatcactcatttccaaagggtcattgattctttcagtttcctaatcaagcagcaccgtcagaagggttattttagttgtttcttggtcagcaatacatggattatcacaacaaatttccctgaatttcacaacaggaataaaagatattgctcattttagtggaaagagatcacctaacagttgctctattacccatggccaatttttttctccctttcctacttctctctgttcacaaaattaaaattgagaacttggatacctgatatttaaaaagtagttactctgaccagataaatatttttggaggataaacaatcttaagtagattgcagttgatggcatggactgtttgaaatttaaaggtttggcatacaccccttttgtttatctgtgaagtaactataattttctttttttctcctgttttttggatgtaaaagctttgaatttattattggataagtgattgcaaaacctgataaaacctcacaaaaaaatcaaggctcaattgtaatgtaaggcatctcctaaggagatacaatctgcaggtcgatttagaggtncccgggtacgagtccgaattgtataat

SEQ ID NO: 4670 - DNA, 842 bp, Glycine max
  misc_feature (700)..(700): n is a, c, g, or t
aacgaaagtaagttttctaaattcttgtcttcacatacaatgtacttcatatcaaattttgtatttctttggtgaataaagtagcttaccaattgccaaaatgtctgtagttgattcaattactggagtatttgtgaagtcgaacaaatctttagtccgaagtttatgttcaaattctactggcattcctataatttttaatttcttcagagaagtgatagctttcagtccttctggaatctttttcagcttctcacagcggtcaataaccatgttctcaagccttggcattgcattttcctcaactgtccactcctccaattctttcaaaagaacaagtcgcaaaatatgcagttgtggaaacccttcaccattgaagttcagttccggccaattgtatgcccctttacccaaaatgagcactttaaggtttggcaatctctccagtttggcaatagactccttctgtaggtgggagttatgcagagttagttttaagaggtttggtgggaattcgtgtggatcaggtagcttcttgatctttccatttaaagagagtttctgaagatgagtgcactgagacagctgcataaagattggaaattcatcctcttcatattgaagtgatagtgacagtgaatggaagtttggggtattccttgtaccagtagaaagaacagaattcaccatttgtcctgantattcacaaatccccaatgcctgaggtttgatcatattcgctaaaccacatctactatcccattttccgccctcatgtgcgggaggggttgtaggatggtttaatgtatcccttccgtagatggctgctatctggagaataa

SEQ ID NO: 4671 - DNA, 1150 bp, Glycine max
tgaaaataagaggtaacccttaggccaaagaggcccaccaataccaagagctggattcttattccttcatatagggccatcgatattttccaagatttagattcagtttattaacaaaatccaattgttctcttagtgatctatcttcatgcatcttaaacaaatacaaagactgttttaggtaaagacgattaactaaagatttggtcatgtacaaactttcaagctttgaccaaacccaagcagcaattgtttccttagaaacttgccttagcaccttgtcttcgagactgaggataattgcactgtgtgccttctgcaatagtgttttcttatccccgtcagccatcatctttttcgagtttggcttctccatcaagtgcttccaccagaccctgttggacaagaagagctctcatcttcaattgtcatagcccgaaatcattttgccctgtgattttttcaaccttatacttgggcgagcccatttcttgaatcgaactcaaaaaatcgctccacgctcaccgcaccaatttgttgtgccaagatatgattttacttcacaaaagaatgagtttcttgtatgaacaagaataagcaaaatgcagaagagaaaaaaggatgaacgaacactgcactgtgctcacaacagccatttttattcaatctctacataatttctctggttacagaaaactctcttatgatctaggctatgcaggagaagaaatagaagcactatttcaatcctaactaacccaaccaacttaaaactaattaactgttacatgttataacagaataatagaaaacatgaaaatactaagttgataaagagtaagagaactaactaatggttgttaatgaaccaacatacaacatgtagtttgagacttatgaagataagttagatatttgaaaaaaaaaatttctcctatagtaatcctacattataaagtggaattcaacaccacaaatcatcattacatgcggaattcaacaccacaaacctcagtttgcttatgtttttccttcgatttatcaatattcctttcttactattataatgatcatgttgcctagaggaagacaaatgcatgaataataaaataatatgattgtgtgaaattaacattatccttgaggatat

SEQ ID NO: 4672 - DNA, 781 bp, Glycine max
  misc_feature (688)..(688): n is a, c, g, or t
  misc_feature (766)..(766): n is a, c, g, or t
tatgagggaggctgtattgtcattcctattcgtttattgcatctcctatataacttttttctcatcttcctaagatgtcctttattaaatagttgagtcagacaaatgatctactgccactcctatgatcatccaaatttctaattaatatttgttttatttttaaaaaatataaaaatgacttcctaattacaggattagtttttcctttttaattcaatgttcgtcagggccaacaaacaaaactaaactctacaatacaagtgttttcaatgtgtaaactttatgatcctgttggaaagtggaaactgaaatgtcttatgacccttgcttgtgagtctttttaaaattatttgcaaaacaattttatcctttctttttattccgtttcttctagacaagctcaatgagaaccttcatttttctatctgttttctgttcttcctaaatcatatgctgaccaattgcatccatatcatcctctgcttctgtcttaaccttccaacttatttactgctagccactaacaacctgtcaattcatgtctttagacaaatataacaagtttcccaacatctttatttcaattgctgcttcatgaaactttagcactactttagtggaatatgtcacctttcttggtgtagttttgtcctagcaagtaactatcagaatccattcccagatnccattttattaaactcgcgtacatagcaaactatcttttatatgaaaggatatagggtaatgctacaaacactgcttntgaagcttctgctta

SEQ ID NO: 4673 - DNA, 1392 bp, Glycine max
ttgagcagtgatgttggcattgtagtattctcttggcactagagtcactagaccctgtcaccctgaacacaaagccaacccacgtggtggaatgctatggtctgtcggagtcccagttgttgttatagtgggcttcataagggtacgtatggccttgagctatttacctcttcccctcaactggtgaattttctgggtgaagtctctgaaggttatattatcggtggctttgatgctttgtcagtttttgctatgcttctccttgccaatcttaggtttacctatagccaaaaaattattcttaggtgtgtgtcttgcccttggtcctatgaaaaattccaatcaacttaagatcaaaagtatctcttcttttgtcaaccatgatgtggttgaatgacatcatactcttaaattcaaatgccacagggtgtatgtgtctgtttgctgttttttttcccatcaaacttcggcattttgggactaaatctaagaattaagattaagtgactaatctaactctaaattagaaagtgtgtttgcatgatgtgcaaattcttttaataatgtagtagttgttgattatcctatgctaacatcttggtttctatttcaggcattaatagatgctacatcttctgacagcagtcttgaggaagagtcaggtgttagaatggtggctttatttgaccatgaggaagttggatctaactctgcccaaggagctggctctcctgttatgctaaatgctgtgactagggttaccaattccttcagctccaatcccaacgtatgattcctttaatttttttttacccctttttatgcctaagaactacatcgatgactcttacttcttacagtgagttaaatctaggtaggggctgtggtcatgcacttatgccagccctcataatttacagcaccattccactatttagcattttagatatttcaacggtggaaagtggaataaccacactctaattttgctttcagtatctaactagtttttgttatggtgatttgttttagcttctggagaaagcagcacaattaagctaccttgtatctgccgacatggcacatgcactacacccaaattacatggtacatcttcttatgtgccttgatttacttttgccaataattcaatgttgatccttatcaaggcctaatttcttacaggacaagcatgaagcaaaccatcagcccaaactacatggaggacttgtcattaaaaccaatgcaagccaacgctatgcaaccaatgttgtcacatccttcatattcagggagatagcatcaaaacataaacttcccgttcaggttagttcagtgaacaattttatctctcttttcttcctttctgattggaattggaactgattgctt

SEQ ID NO: 4674 - DNA, 750 bp, Glycine max
  misc_feature (629)..(629): n is a, c, g, or t
  misc_feature (640)..(640): n is a, c, g, or t
  misc_feature (664)..(664): n is a, c, g, or t
  misc_feature (672)..(672): n is a, c, g, or t
  misc_feature (674)..(675): n is a, c, g, or t
  misc_feature (716)..(717): n is a, c, g, or t
  misc_feature (719)..(719): n is a, c, g, or t
  misc_feature (725)..(725): n is a, c, g, or t
  misc_feature (738)..(738): n is a, c, g, or t
gcctgcagacacatttattaggtccctaaacactgccgcccttaacagaattgcgtataagcgtaaaacaataaaattatcttaattcaagtgcttggcaaaagaatgaagatatcaataattaaataattatttttaacatttttttcttaaatcagcaaatactttatatatatatatattaaaacagaatggtactaggtactcaataacaacaaataacacagccaatatcagctagcaactcggttagcctatattaacaccacaactagtatatatataagctaaccagcaagcatcacaaagctgtaactaaacaaaacaaacgttttgtagtcactattacccacaacggcagaaaaatcttatttccgttattacatacaaaatccgcagaaagaggtgccgttgatttattttttaatttcatttttaattatatttttaaatcataattacaaaaacaacatatcattttctcgttatttcttatttccaagatgttaagaaaaatggtgaaaacaagacttattttcaccatatcttttgtgaattcttgaacaggcaaaacaaattgaaaataaagtattatttttgtaatttattatttaaacatatcaactcanaagaaacgcanaaaatatcccaaaaattacataanggtactgntnngcccaaatagtaaccaacacattggaaatcacatagacatnncnaagtgntactcatacaatnctgtattgattg

SEQ ID NO: 4675 - DNA, 1482 bp, Glycine max
tgcatgcctgcaggcagatgtgttttatcttccagcatatctacaagtttctgcaaataaggtgacaagaatcagaatgaaggcaacaaaatgcacaaggctcccatctagtggggtttggagagtagacataggcagctttatcactgaaagcagagaggctatctccaggatttgaacccgagacctccaggtcacaaggcagtaacattaccatcacaccaaggctcatcctctgacaaaaatcagaataataaattgtgcgcttaaaataaattaatcaaccagatgaaaccttgtataggacagagagagacttgaggccatcatccttagttattgcagccagtgcatggacagcatactttgcctgcctccgactgccttctaaacatagtctctccaatataaggtctacagaactgtatgacacaaggaaatggtaagaaaattgtacaagaaaatgcatttaaaaggttaacaattttaatagtagcaccttgatgtgactgcaagttgttcacgaatagtaccaccagcctttgctaaaacatttagaacaccttcctgaattgtatcattatcatctttcagtaaattcaccagctcctcctcactgccacgaaggagcaatggactgaaacgagcaactatctgcaatttacaagtcaacccgaagttaaaattattattctagtattcttaattatcatgtccaaagtgactcaaaacataccactgtttcataacagaattaaataacattaaattattggagtgagatattaaaaaataaaaagcaacataacacatgacacttaatgaaaaccattcttgggccctctcctatcagcttaaacaattaggatgaactggttctatggcattgtatcaaaacctctccaaggtcaagagttcaatcctagtagtcacattaaattaaatttcaccccactgtagtgccaggtttgagctttgtgcacactgagcttgaagggcttgcacaattgctaggcattctcctaacaacttaagcatgtggaatgatttgcacttgacagacacaatcactctgagctcacaattccaattagccatattcgagaaactgagatgaagaaagagagaaaaccagagaaaaatgtaactgatattattgtgatctgaaaagtcagttagagtttgttacaacaaagatatatatagacctctgactcttctaaactaacactaacagactctgatttcttaatatcagtgaggtacagttagcaaagctaacagcttgtacaaacacataatctgctatctaacactagagaggtgttgttagtaaaagctaacagccctgacaatcattctacaaaactgttttcacagttgtacaactacatactctaatacccctctcaaactcaaggggaagagttttcagaagaaacactcttcacattgagtttgcctctgagaacttcaaacctt

SEQ ID NO: 4676 - DNA, 801 bp, Glycine max
gagaaacagataatcagacatgaaagaaccgtggagaagaaacaaagcacacagtaaaagggatataatatcagaaaaaatgcctattcaataatttttggaaaataaatatgtagttgtgtcatcatctgggcacagcaatacacttctgctatcctggatatttgcatcaatatccttccaaaagtttgaatatacaaaaactctcattttcttgtttctaacactcaaattacactcataaaaggttaaatttcactgaacaaaagaaagcaagacaaattgtgcacgtttagttggatccatgtcagtattgatgctcatcatgtagcagtcatgtgaacagatgcagatcacgatgcaaaattttgctttctagaactaagttgagcaatccaattaatgtaaatgaagtcaataaacagctttacagatttttttccaatcatcaagcttgatacctgtacgtcatgcaaaaccatatttacccttatttttaattacccaggccaaaatgttttgccgcacacaagtcgatactgagtgaaaaaagtaacaaggcaatttaataaaaggacatgtgatgtaaaacctatcttcccaccattgaaatctttgtcctcagaagagcctgaaaattttgtttcttttatgtcaaccctttccacatcagcacctgagtccaaactatcttgcaaccgttccttgatttctggaaattgatccactatccgaaaagtctgcaactgcatccgagaacacctcatcttctgatctaatattttttctccatttccttca

SEQ ID NO: 4677 - DNA, 819 bp, Glycine max
ccatacttgcatgcctgcagtgaatctttgtattgcttttttctacactaggtggaattttgtttcaactgtattagttagccttttgataagacaaattcctgtatgttaaatatttctatgaattagcatgctgtattttgcttgtttccgtgtctcctattgcactaccttatgggcttagatgccctactttgcttgcaattgtgtaaaggtttgaaaggttgctcttttctttttctgtatgagatcctctttgcctgaataatttagtatttgaactcaatatatgttattatggtttagaaatggtggatatttgtgttcttgactgttcttacgctcctgaaggtgacaaatataaggtggcaaaacgatggggccacattcatattgtgacaaggaaatggtttgatcaatctattgctcgaaaaggtaacttctatgttttaatgatgtctgttgcaacaactttcaggtttgaaactaaatagtaggacatcacatgttagaatataatgttactattgtgttagtggtctcttagaatttgggtttggacaaactcaaccccaaaaattttgctcaaaatgtgagggttacccctcttctcttatatacactgttttgaccatgtcactagtcattgtgggatacccaacacccctctcatgccgaggattgaacatctcaagtgtgaaatttgcaaaactagacatttgagtgtggtctaatacctggtggcctcattgggccaacaacagctactacaatagactctgatacccttttaaaatttgaatttgggcctaactcaac

SEQ ID NO: 4678 - DNA, 830 bp, Glycine max
agcacacaattacaaacacaagctgaaagcgagtaagacgagacaatcattgaagtaaagcaaagcaagtcattaccataagctgtgcctgcgggaatggcggacagctttggccttggaaacggcaactgttgtgattgcgattgcgcaactggtagcgccaatccttccatggtcgataacggatagataactctccttcccttctattcacttcgctccccaccacaccacataataaccacattttcaactatttctcatcttaattatctttattttattatatttttacaaaatactagtaattatttctgattttacttactttattattgttttataataatttttatgatatattttcattttttaaatattataaaatgaatttgctgataattatttcaatcatcaattttatcctataataatttcccccttatccacggctactttaggttaggattttatcatatgaaatatgaattgattgcaatttctaataagaaatataaggcttctgtaaatttattatctattgtatagataagttctttttaatttatttaggatagtttattttattgtattgtttttaattattatctgagaacatgaaaataattactaataatcattgaatcaagattaaaaataacaaacggttgagattaaaatatttgaaatttcaaattaaaatttaatatatcatcaaatctttatccaattaaccaaacaacaaataaaattatgaaaaatgtaaattatcattccctaaaacatctcaattaactcataattattatgactgacattatcactaacat

SEQ ID NO: 4679 - DNA, 836 bp, Glycine max
aagtgttcaacctatggcctgggttacaagggtcaacattgcaattggtgttgcaagaggattaacattcttacattccctggatcaaaatgttatctttcgtgatttaaaggcttccaatatcctacttgattcggtatgtgatattaaaagtttggtcagtcattttttaacgactggtttatgtgagatttccattctgaaagagtagcctaatggatatgcaggacttcaatgcaaagctttcggatttcggcttggcaagagatggtcctactggagataatactcacgtttcaactagagttataggaactcaagggtatgctgcaccagagtatgttgctacaggtatagttcctttgtcttgatcaaagtgttgagatctaaatttagctcagactagttgtttttttagttaaaattgtttccaatatatctttctattggtttgacttaattttgttcttctagatactaatacataaaataaataattccataattcactttgatgtcattttatttattcctcccttttcctctagctctggtccaggatgaaaaaatattaataaactaggttctttcctgctggtttgttaacattttaaccaaggcggacccggagcttaaaactgtcacacaaatgattttaagaatggttgggtaatccatctaactggaaaactttaggacctggcaaagcacatttgcttttccaattccaaaatttgctagcacgacttttcttgaaggcttaaatggatcgggtccaaccttgaatcattgggcacttttagacctggccctcttttcaatacccccctggcgct

SEQ ID NO: 4680 - DNA, 1323 bp, Glycine max
tttgcctgcagctgacatagctgttttgccaacatttgtggttagaagtttcaactcggccaaaatacgggctaatacggggaatgcagttatggacagagcaacacccataaatacaaggaatgctgcactatctgcacctttggcaattgtttgttttagaacaaatgatgaaccaattcctattacaaagggtaggcttattccagccatagcaatagcaagaactcgatttccagattgacgcagagatttaagatctaactccaggcccgctaagaatagaaagaatataaggccaatgtttgctaaagtatctaatactgtaagactcctgggtgggaaaacattttgcatatagcttttattccgtccaagtgctgatggcccgagaattattcctccctgtcgatagcagtttcacacattttaaaatcattgtacatattttggcatgtgtgtttctctaacatctgccctgacttatgagttgtttaaagtcatattgcattctacaccataactttcacattaaatatgagactcatttagactagtgaaacacagtgaaatctagagactgaaattatatagaaatgaaacacaaaaagctcttgtcatatgccaattgcctcgtaaactagtagcaatccaacttgattaggaagcaaatgatgattggtttcatccctgtgagtcatattactcactcttagccctatttgctagggactctcttgtaagttgtaactattaaacagagaaaaagaattggatcttactaattcaaataattaatatttatttttttattgaaaaaaaattagtttattaggggaaggcacacccccccacaaggtcagagaagacccccaatcttagcgaggatttatagtagaatttaaatatcacttgtgaaccggagaaatctgagaattgaatccaaatcacaagagtgtgaagaaaactcgatcagatgtgtcaatcctgtttgctatttatttatattatgaaccagaaaatataagctaagttaattagattgattaaaaatcaaagaaaagaaatgaacttacaataatttctgcaataactctaggttgccttaaaggtttaagaagatatgccagtccccttgagactacaagaacaaggcatatctgtaaaatagcaaggggaagcgcgaaatcaagaggattgtcaccctgaaacgcgccgtttgatgtggctttcattggctgcgggcaagcatttccagatgtagcattggaagccatttcaacagtccaaaatccacaactaacagcagatccaccaaaattt

SEQ ID NO: 4681 - DNA, 795 bp, Glycine max
aagtgcttgcaacgtttgagagccaaggtccaagacaaggataggttcgtcaaattgaatccacgaagcaccagcttgcttaagatcagccacaacttccctgagtttgagaaataattaacacaaaaatataatcataaagggaaaaataataatgaagatgtgctgcacacaatttaaagccttacttatagatagcaaggacttttgggaggagagaaagaagacaaaaggacttatcaacacccttggcaggtttggagagcaccaagtatgatacagggccaatgaggactggaactgtatctactccaagctggaagaaacattagaaattcaatgagaatctagatattgataatatttcatgctcagtccaaaggtaaaataattaaaactatcactttaggcctactaacatttgttattagttttttaaagtgaaaaatattaggcatattgactaagaggtttcacatatcactcttttcattaaagtaaaaaaagaaatttcaatttttactttagttctcatgggtcgacccgccctaaatattaaccactcaaaaaatcatgatgctgctcacacccactgcttaacttaactaagctctaagctttgtaaataagcagataacatgaatggctataaaattcataccgccttggcttccttgtactcattcactgccttgtgggaagcataactgaaatcacatcaggtcccaactcggggacataaagtggctggatcaatgcacataatcatcaggtcagtcatggcatcaccagtat

SEQ ID NO: 4682 - DNA, 708 bp, Glycine max
ccctttagagaccgctgttatgaaaataattaaacccacaacataaactcaaggaaaaagtaattgattccttcttgtattcccaattgaactggaaagcaacaatataatttagaagcatgcaatagcaatatggctaaaacatgataacaagggagtacttggataatgggtagataccagggactgattataccaagccattaccttataagcaggaatttaagaagcctgtctaagacagcagtagcagtcgtgaagccagttcactccccattcagtgattttagccttcacattgatgctacacaattccataaacaacgtgatttctcaatacaaccactttcatctggaatttctagtccacataccccttatccaagcatcacctatttccttaaacaaaacaagtcaaatcaactaccaaaaacataaaagatactcacctcagaagcattttctctagacactccatcttttggttggaggtcactggattccagattgaccacaccccacagaaaccattgtcacgtccaagagaaagcttgtgaaaatccttattcacagctctaccttgggggcttcacatgggccacatacttctttggaattccctacccccaaaaacacattcaataatttaattttagtccattaaaaacaaaggcaaaaaagaggtccctttataacaaggaaaaaaaa

SEQ ID NO: 4683 - DNA, 674 bp, Glycine max
aagagctttggaagacttgagagcttctctctttaatcaattccgttcctctgaaggtgcaaagcgtcaacagcagcgcatatgtggtccagctattgcactttccttcaattttctggttgcagttggtattattttcatgaacaaaatggtttgtttactctctttttacctcctatctggttaagctgtgttttctgttgaaatttaaaaagtattatggtttttatttgctgattttctagggtttttcttgttttggttcaggtgcttcaaactgttcagttcaaattccctatacttcttacactaattcactatgtagtgagctggttcttaatggcaatactaaaagcattttcttttcttccggctgctccttcctcaaaatcaactcgattgtctactttatttactcttggatttgttatgtctctatccactggctttgctaatgtcagcttgaagtataataggtagcccaaactattcacatttttatttgaagtatttattttatacttttaatttgatttctatatcttcagcattggtttctatcagatggcaaagattgcagtgacaccatcaatagttttggcagaatttgtattgtataggaagaaagtttctttcgcaaagatatgcacttacttggttgcatgcactctgaa

SEQ ID NO: 4684 - DNA, 827 bp, Glycine max
ataaattttgtaatttattattaaattgatcataaaaatatactttttttaaaaataatccttaataattacaatttaatgacccaataatcacataaatctaataaaaaaaaataatttattttactttttatacatttaaaaattaaatttatattttttatcatttaagaatcaattaatcatcatattatactcatacttggatgaatttagttatttgtcctttaatttactccgattgaactcatatggggtttattgtaatattgtttcagtcacgtggaactaatttattaattaaatcaggaccttggaatgtatgaatcatccaatcatctaggggcagaaatcgaatgtggacatcagtgtgtggagcaatgcaactagatggaagtataaaaagcaaccaatagcatgcatagttgaccccagaattgaaatcttatctatttattaaaatgtcttggtgcttcatcatttgtgtccatgacgagtttttcttccctccctggaactgaaaagggaaatagggtgacttgggctgtgggccatctgcaaggattttgtaatcttggagatgcatgtgctccattaaatgattccatttcgtgtttgatcccaacatcatgcatcgcagtactgttttggacttatccaggaataaggtaacccgcccaagcaaatgtttacacaaattttatttatttgtttcacactttttctcgttgatgtgatttgtctttctttcaatcaacttaaattcacttcattagtggcccactgtttaatatgcaaatagttcacattcaaacatattttgcagt

SEQ ID NO: 4685 - DNA, 1780 bp, Glycine max
acttaaagatgttaacaagaaaggtgatgatcatggaaagcgtgtggtatctacattggtaagccctttttacactatgtgatgcaagtatttcaactgaatacttaaatgggaaagggtgtaaaagaattgaatataaaatcatagcagatagttcttcatgcatggctgaaactctagatatggtgtataaatgctgatcatatgatttgtttaccatgatattgatctgttaacttagttctttactaactttagattgaaatatgggagcaaaggagagtgtttggatcccaggctaggaaccttaaagatttgatgcttggagaagatgcacctccaccattggaatttggcaaaaagcgatcacgttctgtaagaattgcgaaaagggattctcactccatcaaatcggtgagactgagttactgagggcctttgcaactacatccttcctctccccatttcatacttaaatcattttattgatgttagatagttacatccttcatagaggtttgctatggttctttcatatctcacttccttgatattgtcttgatgccagaaactgtccataggaggtacagcagaaaaaatagtgtctgcatttcatttggtgctcagtgagcaatccgctgaagatgcagagatgagtaagtgcaaatcttctgttcagcgtgtgaggaagttggaaaaagatgttgataccgcgtgctctgttggtaagcatacagcagaacagagttacagaagtaacaccttaattatggaagttagagttctaatattgtttcttttttctgccaaagatcctaagagaaatactttagcaaaggaactagaggaggaggaaaatgttttgaaacaatgcatagaaaaacttaaattagttgaagcaagcagagtagcccttgtatctcagttaaaagaagctttgcatgagcaggtaagttatacacttgtgttcaatattttcagtattttattgagttttcggttgttcctaactgtgtctttcaattgtttgtggatttttgtattaggaatctgaactagagaatgttcgtacacagatgcaggtacgtacttttcatgattcttttccacagaaggttgtcatattttgttcatttatcttggtttgttgccatttaattacttctctaatggtacctcttctgcatatatccctaggaagtaattctgaatattctccttgtagtttattttcatgcatatgaagagttaattttcatgaaggtgttcatgtaggtttaattatttctcttatggtacctcttctgcatataaagagttgtgtctggaagatgtttaaataggaggagatgctttgcctgatgaaatttaaatggggaagatcagtgtaatttctgaaacaagatagggtgtttgcgttaagtttcataaaccttgacggaggttagtgtaataatcttgatttatgaagaataaacagttttggttaaagaattgcttagtgaaagcaccgtacacaatttgagagtaaaaaatctcttgttaatattttaatgccgcgtattacttgttgagtctgttttcattattggcatttggacatgtttgcggctttttagctaatcgcaacgacaaatttgaactttattatgcttaaatgtttgtttaaggatatttaggttgcacaggcacaagtagaagaggcttgcaacatgcggaagatacttgacaatgaagattcctctcagaaaacatccactggaaagtccgctgcaggcat

SEQ ID NO: 4686 - DNA, 1366 bp, Glycine max
  misc_feature (1360)..(1360): n is a, c, g, or t
gcctagactttgctgacctgcagctgaagttcagaccaagagagcattgcagcaagagttgtgggacactgcaagtgcctatgaatcccttatgcgacagaagtccagggccaagtggatcaaggagggggataggaattcagcttattttcacaaggtgattaatttcagaaaatgctcaaatgctgttcatggagttttcattgatggtgcatgggtccagcagcctcatcttgtcaagaatgcagtgcttaatttctttcaagaaagattcactgaacagaatccatgtagacctaccttggatggggtaatttttcctatgatagatcataatcaaagagaggggttggttgcccctttctcagatgcagaaatcaaagatgctatttggagctgtgatggtgataaatgtccggggccagacggttttaattttagatttatcaaggagttttggggggtgctcaaacctgactttagaagatttgtggacgaattttatgttcatggaaacttccctagaggcagcaacgcttcttttgtggctcttattccaaagataactcaaccccagtcattaaatgactacaggcccatttccctcattgggtgcatgtataaagtaatagccaaactcttggcaaataggttgagaaatctgctggatgggttaattgatgaacggcagacagctttcataaatagacacattctccatggaattctcattctcaatgaggtggtggatgaggctactaagagaaaaaagcctactatgatttttaaagtggacttcgaaaaagcatatgattcagtatcttgggctttcttggattacatgatggaaaggtttgggaatcaaagacatcaaaatcctcaataaggctcttttattcaaatggaaatggatgttgttccaccaacctcatcatctttggaacaggattttggtctccaaatacaaaggttggaggggtttagatcaagggcctaaaaagcactgtttctctacttggtgggctgacctaagggccatcacccaacaccagagtatgaatgctgctcttaatcaaatatgctggaaggtgggtaggggcgatcagtttttattttgggaagatccttgggttgatgaggggacttctttcaaagatcaattccctgaattattcagaatttcttcccaaagacattgtagggtggcagatgtggggttttactctgaaaatgggtgggtttggaacctttcttggagaagacatttatttgataatgagatggagacagcttctaaatttattgatcaaatatcagcaattaggctaaacataaacctgcaggtcgatgttattggatncccccg

SEQ ID NO: 4687 - DNA, 1430 bp, Glycine max
  misc_feature (17)..(17): n is a, c, g, or t
  misc_feature (1404)..(1404): n is a, c, g, or t
  misc_feature (1412)..(1412): n is a, c, g, or t
ctcggttacccgggggnatcctctaggatcgacctgcagaccaagtaacaaaatgagacccattttggtcctttggcacactcacctacaactgggccaacggattccggtatgtggccacccgtaaaactcatcccacatgatacataaatctcatttttttgaatccgtttaaaaaaaaaaacagttttttaaccggtcccgcacaacgtgcaggttaaataggttaatttattttatttgtgatttctcaagttttgtttgtttatctttggattaagaattcgaagggtgtgagctgctctattattttttttctctctctctcgataatctttgcttctgaaatagttttgttgactcatttccttttctttgcagacaaagatcaatgagtagtgtgtggtgtggtccaaaaatgtacgaagaaagtagttgctatgatcccgatgcaatgatggcagagggagcagaagactgcttcccccaaatggtttcagaatcagaggcagttatgtctgctacacccacacagacccacacccacaacacctttgcctactcctattcctgcggagaagatgctgcaaatgcaaatggcccaatagcgatggaacacccccaacaaaatccatacaattatagcaacacccaatttgtggaagagctttattcgaatcagcaatttacttatcacacaccaacaccagatctccttgaccttctccacttgccaaaccctattccaggagataataggacaaacgtctcctctgtgtcctatgaccccttacttgcatctcaacctgcaacaacaacaacaaccctaccctccgagagttgcttcctcacatgccggctctcagaaatgatttccccttcggcggtgccgctggaggggacgacatacaagacttcggaaatggattggtggacttcactcaacaagaagttgggaaaaggagaggtggaaagaggacgaagcagttcaccagcaccaccactgagagacaaaggagagtggatttgagtagtaaatttgatgctttgaaagaactcatcccaaacccctccaaggtaattaattatataacttttttcatcctatttagacaaaaacataacacaagtggatttttttatattaaaatattagttgttagtctgttagcggaggatcttcaccctttggatattgataattttgtttttgttttggaaaccaattagagtgatagagcatctgtggtgggagatgcaattaactacatcagagagcttaagaggacagtggaagaactcaaattactggtggagaagaagaggctcgagaaacaaagggtgatgatgaggcacaaggttgaaactgaaggtgaatcctccaacctggacctgcaggcgatntagaggtnccccgggtacgagtccga

SEQ ID NO: 4688 - DNA, 848 bp, Glycine max
atcctctaggatcgacctgcagttgtgggatcatcaacttctatccatacagaaacatcagcaccttctctcctaaccccaggtcaattattgcagcctggaccaagtatagtttcttcagctcagccttcacaagcacctcataaggatgttgaagtggttcaggtatcgtcaacatcatctcctgagccatctgtgccagtttctgctgaaactcaaccaccaatactgccattgccagtaacttcacggcccagttacagagtattcttcttctcttgatctatcagtttgttgcatgcagacacacgcacaattgaaatggttttgcttgtaattgtatgtttttatacaatatggtaacatgttggagatcagattctcataaattaaatggattaatctcattatctagagatatttagtgtgtttggacgagcgtttgtaaacttgattttagatgatctttgattttgcaaaattgattttggttagatttaagttggttttgatgagtgtttactgttttaaaaatttgattttgaatgaattaattttgtaaaattgatcatgaagtaacgagatttatttcgatgtttttatcttgataacaagtttgatgtaatttagatagtctacaaactcttcccttctgatcagcttctctgtttttttatttttttgtagagaattaaagtaggatttggtctggcttgtgcatgattttaattggcaacttccatacatgaattgggatgattgataagcctttcttaatttggttgctgggtgcttttatgatataaaaaaaatagcccttaggtggttatattaccgaaaccctaggg

SEQ ID NO: 4689 - DNA, 1335 bp, Glycine max
gcttctctccttggccatgcaaggaatctttcgaggattcaaggacactacaactcctttatatgttattcgtaggttcaaatgatccattgtcatgaaataaagcctaaatagagacaaagtgtgaaagaatgaaaatgcatgttaaagcatgctagtcaaataaatttaaaggaactttgcataaaatgttaatctgctttcaaatttatgcataaggaaaaaatagaaggaaatccaattaaagggttaatgggagatattttgtttttaaatttgtaaacattttccttaacttggttcatctgtgtatgttgttttgttcagtttcggggtatgcattgaatgtcattttggatccagtgcttatcttctactgcaaattgggcatcaaaggtgcagccatttcacatgtgctctctcagtaagtcttacctttgtcttattctagtaatgttcaaacatttcatttagcaaaatctgagcttacaaaattgtgatcctttctaattaggtacttgatggcattggcactcatggtgatattaactagaaaagtggatcttgttcctccaagtattaaggacttgcagattttcaggtttcttaaaaatggtatggtggatggcagtaaacacagcatgttggttttgattgctatattatttttgaaatctcactctcctcgattaaacccaaaaaagagagataaaaatggtcagctagaatggactcaaaaatcaatatagtaaaaaaaaagcctcacatactggtccttcctggttcagaattgtctccaatacaaaatacttgttgtctttaccaaaaaaaaaaaaatcaaatatatgttgatcaatcaagctagaatttactcatgttaaaatttattttcaatttcaataggaggtctgttgttggcaagagtaatagctgtgacattctgccagaccttggcagcctcattggcagcaaggtttggtccaattcctatggctgcattccaaacctgcttgcaagtgtggctcacatcttcccttcttgctgatggtttggctgttgctgtacaggtacaaaacattagtttgcatcacgtcttaggttcaaattttaatattgtcattaggtagtaaaagtgatatgagtattactgatagttgatccaaaacatttataaataaaggccttaagttcttgaactcttttttgtgagtaaaaatcaaatgagtcttctaattattttccctttctcaggcaattctagcttgttcctttgctgagaaagattatgaaaaggtgcttgttgcggcaacacgaacagtgcaggcatgcaagctg

SEQ ID NO: 4690 - DNA, 808 bp, Glycine max
tacaaatataagaaaagcaaggttaaaatgaaagccgagatcaaaaaggacatgaactaagttgaaaaacataaaaaggaacgaacgggaatcttgttttacaaaagattttgccattattgactttattgtaaaagcaaaaacaaaaacttatttcgggaaacaaattttaaaaagaataatactattatggaaactttaaagacaatgagacaaactgctggcctttttcaatcatgcatgtgcggtttagcatcaaatcaggcttatatttcggaaaagaaaaaaaattatggaataaaattttaataaatccatccaaataattgggtattcctcaagagatgcaattgtattatgattatcttttagtacatcctttgagttatatcttaaataaaattcttgccaaaataaaaggtcagaactgatctacttctgaattttgcattacatgaaagtacaagttaatcattggtgaaccctcaaaggtcaaaattcatcaccatgaagaaccatgtagatattacagtcccacaattagcacagaagcttagttcagtccacattgataaccattttataagaagggattatacagtaacaaacaattctttagccaatcatatatatgacgattatttcatgcctggaagatacttacatttgaaactttcactgatgttcgcagatttctgggaagaggctctcccatgtctttactttcctttgattcccaagtgcgtgcagccgcaactgacgggggcaggatttcaggaggaggggcaaatatgtcatttccactgag

SEQ ID NO: 4691 - DNA, 880 bp, Glycine max
cccggggtatccttctgagatcgacctgcaggttcaaaatgctattgattatttgagattattggggccttagacgagcaatgaaaatttaacagttttaggtaaaacaactactgcatcatgttctctatttctcttgccattttttatgaaaagaatttgctcatcattggtttttccaagcctttataacgtattattttgatttgttccagagctactgctgatattgaaatgctaattttcagggcacaaattggcaatgcttcctgtggagcccaaacttggcaagatgctcattttgggagcaatcttcaagtgtttggatcccataatgacagttgttgctggtcttagtgtaagagatccatttgtgatgctgtctgacaagaaggatgtaagtttttgttatgatcactgctgatatttcctcctccctgacttttctttgtttgctgaacttgggatgtcttcttgatagaaatggtggtggattttataagttttgatggtatcaagtgagaccagttattttcaagagtattatgactggaagtaaactataacaaattcatagacctgtcaagcatgcactctgtattggttgatacttgataccattgaataaaaatgacttcatattgatcttttttcggtgcttataatggttcatttttaatattgaaaatgctggtgctctgccttcattactagcctggatcacttacatcatatcagtatgttaaaagtctgttaagtagagaggagcctggcttttatttaattgtttactggctatgttttatgcagcttgcagagtctgccaaaccccattagctgctcggggctatagtgatcatctggcactcatcccggctta

SEQ ID NO: 4692 - DNA, 1337 bp, Glycine max
atcgcctgcaggagtgctgtataaattgggtgactttcagatgagaatcattaaagttgttcccagtcaagcagaaagtctcagaggaattatgattgaggtgtgtcaactctgaattctagttgctgataataatacatgtttgttacttcttcttggtgtgtttatggtatgctgatccaatgttatcaatagcagattgtggaaaatggtggatagagttgcggggaaatattgaaagttgcatagtggttgaaataaatcaattatatgtggagaataagttaagctgtaggcagattaaaaataaactatataacaattggcataacattaactcaaaagttcagttgttcaatacaaaatactgatgaagacattaaaaagaatgggggtgtgggaaattgtgactgcggggaaaaagtcacttgtcctgcatcccggtcacgaaactgtcatgtctgttgcagctgcaatagcagtttttgccggagcctcactgcaatggagtcgcaatagcggattggaggatttcgttatgctatagcgctatagtggctatttaaacacgctggtaaacagaaatgtgaggtctaaataagtgtcatctttgaattggtttgggtaatcctgcatcaaactttggaaaggaaatgtacagaatccattgctagtgttgttttttccatcatgtctgttatacaaacagcaatttgtcatgattgttgtctcatgtctagctagtctctttagtatctcctgaatattgagatagcttatcgtgttttttatgtacgtgattcaagaattgaatgcatgaatggtctagtactcatgtatgtaacagatgggttcacagtaaattagtaactaacaggctgacactctaggtgtggcttttgtaaggtgttagctcttgtttttttttttaacttaatgaatgattaaaaacaaaaaaagtaactaacacagtgtaaatgaagaatgaaaaagatacccaattgtatctcaatgtgatgtggttattctttactttgtgccttttagttaagaatgttttgataaatgtaacttgtacttttgattcaatgagaatttaattataatatatgaattactaagtttaaaagattattcatatatatgaatactaaattttgattcaaaacaatttaactctctggcttggtgacttcttcgcttaaagacgaagaccccatatttgatctagttagtatttccttacaaatttgaccatcgtcactctcttttctcctttagaataatcttgcttagttttactttccttctaaatttaaatattcaatgttcatttt

SEQ ID NO: 4693 - DNA, 855 bp, Glycine max
tcggtttcccgggggatccctctggatcgacctgcaggcaaatgatcctacaattgagcgtattatcactcctcgtattgctcttactactgctgaatatttggcttatgaatgtggcaagcacgttcttgtgatactcacagacatgagttcttatgctgatgctcttcgtgaggtaatttacctttaactattgttagtttggaaaagaagcaacaaaaagataggagacttgaaacattttatggatttaatgataattagaaattgactttcttttatgcctttggcttcttagattgtgggtttgagtctaacttaactccaaaagctagatcataggatgagggttgctcctcacttatatactctatcttgatcttatctttagccaatgtgggacctaggtttttctcaatccaccctctcacacccaggcacttttgggcttagtgtgtggataacatggtggataatcctttaagtggatttaggataggcttaaccccaaaagttagcttacagggtgagggttgcccctcacacccagacacttttgtgcttggtgtgtggataacatggtgggtgacccttttagtggatctaggatgggctctaatatcatcttagaatatgggtttagactaaactcaatcccaaaaattaactcataaggtgagggttgtccttcacttatatattatatcttggtcttatccctaaccaatgtgggaccttgggttttttccaatatgacttattttttggagtatgagaaataactgaacatatttctcaaacaatttgcatgacacttgatcccataggtatctgctgcccgagaaagaatgccgg

SEQ ID NO: 4694 - DNA, 392 bp, Glycine max
atcctctaggatcgacctgcagtcctcggatgccgcgatttccgcggcgttgagggaagaggatgatttgtattttgtgaggaagtctttgaagactaagacgagttttttggcttgtttgaggctttgtttgatggagaatttgccgaggttgtaggggtcggaaggagaggagcggatggaggagacaatggagcggcatagtttagggtatagtgtggacttgcatgctgaagagggtgaagagggtggtggaggtggagggggtgaaggggcacgtgctggaggtggtgttggagaaggaggaggggcatgtgttggagatggtggtgatggagaagaaggaggaggggaatgtgttggagatggtggtgatggagaagaagaggagg

SEQ ID NO: 4695 - DNA, 1296 bp, Glycine max
aatccgatgaatcgtcctctgtgaagccactctgtcttacatttgccgcccccctcatcaatggatccctcacagtaccaggtttgccaaccagtgtttccctggaagaactgacctcggaatatgtataatcacttgcataccggggtcgagtgaggttcccatatctcctagcagcaccattgggggggactcttcggtcttgcggtgacgaatccaatgaatacctgccaccataaacctcctcctccgattcgatgctgtcgtcattatcagaatttgaaccgctgtcgccagtctcacccggcatgactgttgacacagggattgcattagcaggaagatgcccacttctgaattttgctgggggtggcaacccaaaccctctgccagcaccactcttcatcccactgatgggatcattgcgagatctcaatgcagtgtttgagaatgggacttccttctaatcaccaacaaagacaaaaataatcagaattttcacaaacactaatgtgatctcaaggtggacttggagaatgaaacttccctctaaacactaacccaaaaaagaaaaagaaaaaaaacatcacaaccttacaaccttacaaacattaacgtgatctcaatgtagtggtaatgttggtccagaacaccaacacaacaattaaaaaaaaacaaaactttacaaatattaagccgaatcaagaaaaccccattttgatataccgttaaaaaaatcaatctttgagaaagaaaatcaaaagggtgtggaattaacgagtgaaggttacctctctgacccatcgaagtgcatttctgtcaaggccttcggtgaacatcttaacctaaccgttgaaatctcaaataaagcaaaaccccttgatgcaaatgcacttcttcaaaatgaaaggcctaacacaaaaaaaaaaaaaaaaaacgaagcttttggttaaacaaagcaaaagggtgctacaaggaacgaaggaaactatcgcattctgattcagacatgtataagaacacaagttttaagagggtaccaaatggcaacaaaagacgaaacactcttgtggagagagtgatggagtgaatagaaactagaagaggattatggggtgcgagatttgaggggagagaaaaaggggtttgcttactcaaaaagcttcctttggttagcacttagcactcactaactcttagagactgaaacaaaagaaatgacccacaaaaactcaaaaagcgttgttcttctatgctctgctgcggcttgtctcctttcacttttggtgggtttgc

SEQ ID NO: 4696 - DNA, 777 bp, Glycine max
ctttttgaaacaaaaaatcagcacaaaattagctggcatagaggatcataaggtagaaaagaaaaacaacttctctgacaaattatgcatttgtgtcaaaatattcttaaactaatgtctaattgggcttatgttaatgttttcatatttaaaaaaaggcctgcaaattccacgaatcaaacaaattacttgcatccagctatacttggcaacttctacgaagctgacacgggaacagaaacagaacattttgcaatcaattaaacgtaacccaaaatcatattacaatttttgaagttttatgcaattagttgagtttcaccttcgtcagtcgtcactaagaacttgagactacttagctcaaccagagttacatgaaagcgaatatttatcccactttcgaaaaactctttcaaattatgtgctagatagttttctattgttgttttattcggcgtttgatgagggtgttaattcttttatttttcttccaatatgagggagttaattcgaataagtctgacccgttttagtttatctgttttttttttttaagtattttgagtcgatctgctgtggtttcagtcaaatttcgatggattgcatgacagatcaagcctatcgttgacccaactcattcttattctggctcgggctttttgaatagttctgctaactatatatatatatatatatatatatatagaaaatttattcaattaactaattgtattaaaacatatttttatgaatgattgattactttaattgataaag

SEQ ID NO: 4697 - DNA, 655 bp, Glycine max
acaaatgtaaacattctggtttctaccaaaacaaagggcatgcgatgtcagataatagtgcgtagccatagtacagcattagatataatgatatgaaagaacataaaatcatccccctttttttattaatgttagtttgcattgaattcaaacaggaagtcacatttcttgcagtgttccatgagattcactcatgttggcctactcaaccaaagtgcttagcatctacaagaaagcgaaaaaggaataattgtatggggtactcatttatcaatttgattggtcacagtaatgaatatggattagaaaattgagaatattctaaacatgtcaaaggtacattccacatgggaaaatacaagaatgtatagaagatttaccttcaaaagaatgtcatcaaatgtgacattggcatatatcaaatttatgttggttttgtcctgttggttttctaatatagctcttgtaacctcaagaaaaaagaaatatatatatatataattattgctaattcaaagttcaaaaatgtagaaattgaaagatcaaaggaagacacggaatcctttacttacacatacttgaaacattggggtgatgccagtgccaccagcaatcatacccaaagctcttacttggttgggctggtacttaaaac

SEQ ID NO: 4698 - DNA, 819 bp, Glycine max
tgcatgcctgcagagcaatggaaatgacgagttgcggtctgttcctgcccttgaggatattcctgaaagggtgcttgactcctttagccacatgacttgcttcaagtagctccaagaactcaggttcaatgttgtcaatgccacgaatctttctcagcacagcttttccttcttccaagtgaccacgctcgatcagactatttggtgtgtccaccagcaagaaagcccccaacgtcagaagcaacgctggtaaaccacccaaacctagagatagcctccatccccatccacctttgattcagttgttgctcgatcaacaatagtcagcatctccaacaatgaactacaacccaatgtatatcaaaacaaaacaaatggaacatgcttttgaaatcgattatctacaagactacactaaattgaaaatgattttgcatgaaaatcaattaccatgcattttttttaatattcatatgctcaaaataatttatgattagttgaggagagattaaaaataaaaaaatttaccaaaaaagtagacgtgaatcgtgacaaatcaatattactggactattgttattcaaccacaaaaattaaaagaaaaaaataatttttcaagaattcaaaaataaatttgaagaactaaaagatagagtattttagagggactaaattgttatttaagttttttattattggttttatacattttaagtttttaagataactcatgattcatttgccgttttgaagttaacatattattcaaataaagaggatgaaaatgggagcatgcacgcaagaaactaactttgtggc

SEQ ID NO: 4699 - DNA, 860 bp, Glycine max
tattgacttggtcttggtgtgtgtaccattggcgtcgtatataactcggagccaggggagaagagccgccatgttgattcttcatcagtgctgctgctcagaaccttgccatgctttcggaaaccaggttatcctcttttcacctctttcatttgttcccaaaattttcaaaaaataaaataaaaaattattttaaataaaaccaattcaaattaaacacattttaaaaaataaaaaaatctaattgaatcttactaaagaacacaggatattatccaaccttaaaataataaaaggattaaatccaacctaaaatataatttaaccttaaaatttttaaggtgatatatgttaacttgaacattattaaccatgtcaacgatgtcaataactagagactaaaacaaacatttttttattgtatgggatggaataatacgtaaataacaagtgctaagccggtaaagctgaacattattaaccatgtttaatttacttttttttttttttgtgtagatcacaaattctatctacgtgttatccatgtaaacgataaatttaagccgattttggtataatataatttataatggaaaataaattatttgaataatattttaatggtatgaggtggccttttgaaacccactcaactttgtcgctttaattttttattatggcaggcagtttcagattttctttcagagaatcgcaccttcaagaattcatgggagcattgaatattctgtcccagctgaatatcaccccttgggcattactttggccacctggtcaactatgccacccaaggaagtttcttgggggcatgctccccatttcatcctccttattggaaaaaa

SEQ ID NO: 4700 - DNA, 795 bp, Glycine max
tctgatgatgagtgaggatttgcataaatttggacgatcaaggcttgaaagaaatgatttttctttgaacagtcctgttatggtaaacccagcttccaggcagatctacttgactttcccagcagatagcactttcagagaggaagatgtttcaaactacttcaggttattattgcttaggtttagctgtaactttagcttcgactgggatcattgtgcatagttggtcagcggcagaaatattaacttgagtttttaattctgttgttgaagcatttatggcccagtgcaagacgtgaggatcccataccagcagaagcgaatgtttggctttgttacctttgtttatccagagactgtgaagcttattctatccaaaggaaatcctcattttgtgtgtgatgctcgagtgcttgttaagccttacaaggagaagggcaaagtcccagacaagtacaggcacccaccccctctttctactcttatgttatcttttttttttcttttcttttttctttttggttattgtcttgagtttattttgaatgtcctcattgatgtttcttgtgatttgcaggaagcagcagcagcaggtagatagaggagatttttcaccatgtggtactcctactggattggatgctagagaccaatttgatcttcaacttggtaggttatggtggaaacttccattttattatcttttcagaattgtgtctttgtcaaacctactctactcaccacgtgtactttcttaattgcatgccttttagtggcagaatgctctacatactc

SEQ ID NO: 4701 - DNA, 1393 bp, Glycine max
ctcgtgtacccggggaatccctctggatcgacctgcagtgtttcatatagctttaagtctgcaagtacaatatttccttgggagggtaagcgtcaacttatattaaaaaaagaaaaaaaattccatgaataaaattatgatttataataaatttcaactattaattaataaagtgtgtgttacataataggtttctaacatttctatggttcatttatactttaatagtcaaattcaaattatattacttgtggatatcaaatttttctaaatttttttagtaaagattaatcatcagtataattaacagagattaatcatcgtattttgtgcgtttagaaacaagtatagctaggaacaataagcagggtctctgcttgttttgtttgtttctaaacttgctgtattagtttactgcactgtgattggggtacctcttatatcccccgtttttatttataataaaacttaacttgtttgctgataaaaaaaaaatagcaaatactttacaccaatagaggatgatgacccataattatatttacacgccattttaattataagttcgcatactaattttaagagacaaaaaatatgcattccagttcacattgtctttctctcctttactaaaaagtttaaaagtgtttagttatacgctgtgccaatactacttctaaattttgtaatcgcggccaatgcctatatatgaaaaatattattcttcaacttgattttatacgtccacattttaaacctcctttttgcagaaaagacgaaattaaatttctttttcataaaaggtgagtatagaaggaaaatgaattgaaaaaaagtttagaaacaatcttattattgtaaatatatcagttcctcaagactcaaacatcgcatttatttaaacaataattttctcacctaatttatacaagtagaatacctaatcttaagttatctactatcaaacacgctttagtttagattcgatacgtggatcggcaaaagtataagccttgcaagtgtaacaggtaaagttgaaatcagattaaattcgaagataagtaaccttatgctttattggagagaatgttaactttagaaggtgaaaaaaataccttctctagaaatctgtcaatgtcacctaattgaactcgtatgcatctcactagggtaacagagtttaaggaaaagaaaatgcaagagaaatataaaattttgaataaaaaagatcttaaatgaagcagcatcagcttccaagaaaagaaagtataactgattaatagcgtggctattggctaatcccatctgatcttgcaccctcgtgcatgcatggtaaagagcatttctgaggaaagcgagaacaggagggactcatgcaggcagcaagtaaggc

SEQ ID NO: 4702 - DNA, 714 bp, Glycine max
  misc_feature (698)..(698): n is a, c, g, or t
  misc_feature (704)..(704): n is a, c, g, or t
aatccttggaagcagcatctttgtacgagcaggcagcagttatttccttgtttattgtgccatgcacaatgtcaacaactttaacataaaagagatgaagaggtaagttacaattgcaagtcttaagttatttccttgtttaaatcacaccaagcttaatattgttaggcttcttccttgtgtcaacttgtcaaaaggtgccctcttaggaacaaagaggataggcttacaagcataagtgtccctcgcctgagaagtgcttcacaggcaaatgctcttccaatcattggagtcaatcttgtagaacgcataatactcctcctttgtgatctccttaggctctgtcatccaaatggccttatgcttgttcaccaacgagcattcatgtgacacttccttgctgaggaaaaaaaaaatgtgacacttccttaatcttctttaaattattttcttccttctccttctcttcgtcaacatcctccacctaagtacattaaaaaattagatattgaagtcaaattgtaattcaaaaaataccaaaaaaaataaataaacgttttgaagtacttctttagatgttattccttatggttcaagtagcaataacgatgacaattgtatgcatgttttgtttgatattgatttcattttttgcataaaacaaagaggggaacgaccaacaatttgaaagtttgtcntttatnaactattcaa

SEQ ID NO: 4703 - DNA, 1276 bp, Glycine max
aagtaataaaccaactgccattataagcatttgatgctcacaaatttatatgccagagttaaacaaatagtagtgaattaaactaacatttcggacctcaatgatttaaatttacatgaacttatcagattaatttctacgcactattgttgtaagaaaatctatactgtcagtgaaaccttaaatataagtttaaaagtgtgtttggatagagaattttaactgagaaaaataatttatcagagaatttaaatttctttgatctaaaattcattgtttggatattttttatgaagaatttaaatttttagaattttaaaacagaattttaaacaactaaaaatatggaattttaatttccttctaaaaggtaagaaattgaaattctcttcttgataaaagatcattccaaaacgttactgtatttcttttataaccttcatcctctctttcataagtttttgaaatctcattctcgaactcgcgacttttccctttacactgatgatcctttacttcaagaaacaccgtctgagctcgcggaacgttgatcaaatgcgagcgtaggagggcacatagaactgcacccgttgatcaagggagcagtcgccattgcctatcacgcgatgaaagtgctcgtcggtgcagagagcctgtaccatgtcttgcatcgttactaaatgtcgtggtcgaggtatgggtgatgtacaccatcgtgtcccagttctcatgtgactcctcatgctgcatcaatatttttctctttagaaacacaccaaacatatctttcttctctttgcattcattttctttcaccctcataattttaatttttttttatccaaacacattttaaagttacttttaatttataaaaaacaataaatttaggggtttgtaattggatttacactgttaatagatatgagaaactagtcaacgtactgataacgtaaataaataatgtatactcgtcgtatatagtaatttcattgacctttacaaaagttacttaaaatttatacctatcataatttttaatttattgacaatgtaaaaacctacaacactataaaaattaaactcaaatagtatttggatatacttttagactttactgattcaattattattagttccatgaattaaattgacacaatatttggagaattgaattttcctattaagagataagtggatgatgaggtgaaaaaaataccttccaacatcaccaggtttgactagaccagaattgaccctgaggcagggcatagta

SEQ ID NO: 4704 - DNA, 784 bp, Glycine max
aagaaagcccaatccacgagtaatactcctgccatatatctcttaccctttcaaacaaattaattgtaaaagagaacttctaaagttttgcacttggaatgatattggccgcattggacatctgccattgtttgtgggttcaattggaagattttcacagttcatagaaactatttgcatcagccccgaagaaaaaagtgatttctccatcaacaatatagagacttaacaattgtccacaatcaatatgcaacaaatatattagcagaagtgaaataggttataagctagtaattacccctgagagatggaggtgcaccagcacatagctgataaaatatatgatatgatctttccccttcattgcattggactactctagactgttcacataccaaataaaattagtgtcaactgatgtaacgagaacacaatgtagaacataaaactgttagaattgtaatataaaaccgttcatgtgtctccacctaaaagtttaagcttttgggatagatgatgcatgaaaaaattagctctgaagaagaagaattaccttttcaagcaaaactgtttatggtcatgccaggagaatcgcgtagtgtcaacacatagatgcaaacatttaacattctggttagttgcaagcttttggtgggaacaaggacacatgggttccaaccatttaaagagaataaacttaacaagttttgaatattagcaccggagatttttccagtttcactgaagtgaatctcaatgagctttccctgtcacatattcaacc

SEQ ID NO: 4705 - DNA, 1413 bp, Glycine max
cgagaatatcttgacaaacctgctatacatgagacaatggttaaggtttgtgtgtttctactcatgctactaatttgtacggaccatatttctattaaatgccacttattgatgatggcttctaaactgtaaaatgtgtgagaaatatttaatcatattagagcaaaacagtgacatcttcgctaagtggtccatttacgttgaaatttcataatctcttacgaagtatgaagaatgtcaataagtatttctttatgttattatggattttatttaatattttactttatattgattcattcacgaataacaattactaaataatttataacttgatttggtaactatgaaatagcatttgcttgattttgtttcatgtgaatacacttcaacaggtcagtgcatatatacttggagagtttggacaccttctagcaagacgacctggatgcagtccgaaggaactatttagcattatacatgagaagcttcctactgtatcgtaaggggaatcacaccctacctcatatatttcatagttgaaatgcattttttcctagataccttactagaggtgctttattttcaggacttctactatttctattcttttgtcaacatatgctaaaattctgatgcacagtcaaccaccagaccctgaattacagaatcaaatatggacaatatttaaaaaagtgagattttacctctgcaatgttcaatttctattattatgaattttttctatggttttttatgatgtcataggttcttctaatccatttgctcatctttagatatgaaagctcaattgaagtcgaaatacagcaaagatctgttgaatattttgcattgagtagaaaaggtgcagctctaatggatatattggccgaaatgcctaaattccctgaacgacaggttttcttgcaatattgattcagagacaacttatttgaaatttgcataatcacttcgataatctatggtatagcactcatggatttatactctttttcaaattcagtctgcattgatcaaaaaggctgaagacactgaagtcgatacagcggaactaagtgctataaagttacgagctcagcagcaatcccaaacatcaaatgctttggttgtaacaggccaaagtcatgctaatggaactccacctgttggccaacttagccttgtaaaggtgcccagcatgagtagcaatgcggttagttgatccctccacttcgtgtatctttttcactacatcattttggtcaacattatagcatcttgaaccatatattggttcatctttttgcttcttagtttgacacctacttttctaaacaggatgaggcagatcaaagattatcccaggaaaatgggactttgagtaaagtagattctcaacctccctctgcaggc

SEQ ID NO: 4706 - DNA, 1301 bp, Glycine max
cctacttgctgcctgccagggttttctcagaaaatggaatattgagggaacagcgtgaaattcgatgacccaaatgtgaaaatgtgtttgatggtaaatgggattaggttttgctagcacaatttgagatttttttttataattttttttgtggttttttaattcctgaaacttcggtttttaagccgaattacatggtgtgagatccatgtagccaacctcaattagtgggataataaaactttgttgttgtagttttagtttttgtggcgtttgagaattgagtggctcttaggatctgatcatctgataaaatataatgggaatatattgtttcaggaagatcaattttggggtattctcttacatccccagatttggtcatttgtggctcgccagatattgctggaatcagctatggtgattcccctgagttgttgaagaacaaacattccaaggatgtggagcaatctatggagctttctctagagtatggaatcaaggggtctcaagttgaagctgacaatggccataagatcccaaccgttaaattctcaaacttttgtcaagcttttgagcaagaggaaaagctgctatcccctgaagcctcctttgagcttcttccacctcttgtaaccaagaatgagtcaccccaagatctccctcttagtgagttcaactcttgttatctctgattgtgaataaaggttttgaaatttgaacatggttatacatgaagtgaagttgctggttacagtccaaactccagatttttatttaacaacattttgcttcaaattcaggagatactgagatgctagaagacattggagtgtctcaggaggcagaaatggagtcctccgaagtatgcctctttgtgaatagggatagatttgctgttttgagcaggaaaaatgtagggtgataatatgtgctttcatttacaatgatgttcttgtaggataccgaggatattgggatggaagcgaagtttaagaggctgaaaagagactttgacagtcagagaaaggagctgacggaaacaaggagggagttgggggagatcaagagagagaatcaacagaagagtagagaatgccaagaagcttggaactccttgaaagagcttcaaaatgagctaatgcgcaagtccatgcatgtaggatctttgggtatgcataaccctttctgtatttattattacactattataaaactaaactttgaggttttttttatctgatcaactaaattttcggtttgcaggtcgatttagaggtcccccgggtacccagtccgat

SEQ ID NO: 4707 - DNA, 612 bp, Glycine max
tataagtactgctcttgtaagagatacagtggctttgtaataatcttttgttcaatatacaaatccctttttctctcttctattctatgctttctacatattgtgatacaatgttatttttttaattattaataatttcttttaaaaaatattgaaagtcaagttaaaactcaatattgaaaatgatagattgaaagagataagaggttaagaaaaatccctaaaaatgctcttgttgaagaaaaatagtgaaaaacactttcattgaagaatgaaaactaaaaacacttttgtttaaattgctattctaatttatacatagagagggatagttagctttccaaaacccagaatatagtgtacaactcagggaataaggaaattttgttgtaaatgggagaatttcctgagttgtctctgcaaactctctctctctctctctctatatatatatatatatatatatagagagagagagagagagagagagagagatgatgatggtgatcataagaattctttatagttagttcactttacatagtcatacattattaaattttgtggtagatagtcgggatcctttctctccgtataatatttagagcggtc

SEQ ID NO: 4708 - DNA, 789 bp, Glycine max
atggatcggagggaaggccaccaaataagaaccttaaatgacgaaagatggccatgcagactgtccgcatgagctcaccaccaggaaatagcagttgaaggtacctaccaagtagctttcgacccttgggtagagaaactatcctgagaaaaacaaagtcatcttttgcagcaagtgtaaccgtatgtccattctttcccagtggatcaactaactgaagtgaggcagcaagtccttccagaagaccttgccgtttcctttttaacacaagaccaccatcttgaagctgattaaactgtaggaaacggtcaatatcatctacatcaagaagaagataaataccatcttcaattgtgaccctagctgcaagcattggttcctgttcaaggggtttctctgaaatgccttgctcagggctacctgcatgagaggaattgggaggatcaacttccagtagaggacggggcctgcgaattgatgagaatggaactctccctagtgcatcaacctgaagaaaagcatgtggttcagcattagaagagggtcgtagagggagttcctttatttgagctggagaaaagtgatgcctcaatttagcaccagatgactttttcgcaagacagccttggtggtaatagtcatcaacatatggatcattactgtgtgttgctacaagctgcattctaagaatattctcaatttcctcagtagtcatatacttggacctaaatccgggccatccactattgcttctcaggccaaccatatcaaaaacctgtggggggaaaa

SEQ ID NO: 4709 - DNA, 775 bp, Glycine max
atcctctaggatcgacctgcagttgaatgggcacacaaagatgatgttcttaattggtatcaacaaaatgcttatgataatgaaggttctttggatggcagaagaatgtcatcacaacctcattcttctctttctcagttacatgaaccaaaggccctgtacagaacatcctcttatcctgagcagcaaaggcagcaacaacatctccagctccaacctagtgaattggctcccaactggattgatcaacatttgtatggtacggaaaccactcaggatggcaaacgatggtcatcaaaaccacattccaccattgcacacttaccagagtcaaggcccttgcatagaacatctttatatcctgacaagcagcaggaattttctcatctttctagtgaaccaattttggtaccgaactcctcatttacttcttatcctccacctggtggtagatctcatcaggcttctccaagtcagaattcaggccacttaaaccttccttatcatgctacaggagctcagatggcattatcaccaccaaatcgatctcatttccccaattctgcattacagttgagtggaataaaccatgggccaccttttggtggaaacatgcgtcaattttctactggttcccctcttaaatcagataatttaaaatcaattggtaaacccagcagggttatatcctggaaatcaccccaatatttcatcaggtatacccatgattaacaattatgatcagatgcttgggctgatggaatgccggatcaat

SEQ ID NO: 4710 - DNA, 681 bp, Glycine max
accctcgtcgatgcaaacgccaagcacttttcaggcttttctcccttgcctccaccgcctctggttcaacctcaacctcaacctcaacctcagcctcaacctcagcctcagcctcagcaagaacaacagccacagcagcagcagcaagggatggttccgtcgcaagcgccgtcgtcgtttcagatgccgtcttcgcctgtgccgtttgggtgtttgaattcgcagctggcgtcctaccctctgctgtcgccggggcttctgttttccccaacttctggtcagttagggtttccgcagcttccgctttcgcccactgtgccggtccctagccctcgctggaagggaatttgagaggggtgaggtgagtttggtcacagacatgtcaatttagctcagctttttttagggttttttaaattttgttgttgttgttgttgttgtgttacctgtacatggtgctggtgctagggggaattcaatttgcggtggttggactcgaagtggtccgctgctgcttagtttaattctgtaaatgggatatcaaagacatcaaaaagggtacaattttgcattggttcttgccatgctgtttggggatatgcaaaaacaaaattagatgttatacaattatagtgggattattatcatcattatcattatgctgttttcaatataatcaaa

SEQ ID NO: 4711 - DNA, 1761 bp, Glycine max
actcaagcatcccaacgatatcgttcatcgacggcctctgcgtcgcatcttctaacaaacaactcatcccaatctcacaaaacttcttgaagcactcgggcgtgatccttcccttcaacgaggggtccacaatctgtgtcatggtcccattttggtaacaatgtctgacccaattggcaagtgacacttgttgcatctccgcagtatggattagaggtggccgagcgcacaacatctcaaacagtactacaccgaaagagtacacatcagacttctccgtcaaacggtaccgtttatagtattctgggtctaaatacccaaaactgcccttcacaacagtgcttacatgggacttgtcaatgctcgtgggaccaattctggaaagcccaaagtcggaaatcttggccacccatttatcatccaacagtatgttggtggttttcacgtcacggtggatgattgtgtgctttgcgcctgtgtggagataatgcagcccacgtgcggcaccaatgcaaatttgcaagcgctgcttccacgacacaggagggttatcggtgttgtagagatgttgccggagggtgccacgtgccatgaaatcgtagacgaggatcattttcgtagttctcgttgcagtacccaatgagggacacgagatgaaggtgggcgtagctgtgagagcatctcgatctcattcgtgaattcatttgcaccctgctgtgaatccggtttgaggcgcttgatggcgactggggtgaaaccgccgtcgatgtagcccttgtacacgtggccgaatcccccgacgccaatgatgagaacatcgtcgaagttgttggtggcggcttcgatctcggcgagggaaaagttacgacagagttcggaggggagggaggacttcgtggtggtggttgacttggtcgttgtgaaggagagtgggccccacttggaggtcgcggaggacttggacttgttgtagtccttgggcgtagtgattgtcttgcgtcggaagaagacgatgaggaaaaggatgatgagtgagatcaaaacgacgccggataccacacctgccacgatgccgattatcgacgtcgttccgcttttgctgctgcggtttccctttggggcgggtatgttgttgtgtggagtctgaaccaggtccgggttaggtccggcaaggttgtttgacccagcgtcactgattttgaagatctcgagaccgttcaagaacgcgtcgctgtatgtcgttttatccccagttgcataaggatgcatctgaagcgagagattaacctttttctgagtattatccttcggaattaaaacggcatagtttctctgcacagcgagacctttctgattgtggctccattgcataacatcagcgttgtcctcagccaactggctcgctatgtaaatgaagaacaccctgacaccatctttattaatattggggtcaaactcgcaaaagtggagcctgagaacgtaagtgaagccagaatcaaccgggaactcccaagtcaggttgctgattttgttcagagtggcgtttgtgcccatgttacgcgctgttctgtagagttccttaggtgccacgtaatcaggattcacgtttatgttcatcttaccatccgtgttagctggaagatcattattctgtggattttgtttgatcaaataatcttcttcgtcaccggcccatttcctgaacaaaccggtgtcgtttagtggtgatatttcttgccctccgattttgattctatactc

SEQ ID NO: 4712 - DNA, 1304 bp, Glycine max
acacagaaatcaccaacaagtggtgattacttacccatattcaccaaagaaatggaaaaacttcaagaacttgtgacaaaacaaaactgggggactcactctgagggcatgtcatcaacaacaaccactcctatctatggcttggcacaatgcttccaagacctttccagcattgattgccttcagtgctttgcatccagccgcaccaagctccctcgctgcctcccttcggtttcggctcgaatttaccttgatggctgcttccttcgctatgacaactacagtttctacactgaaaactatgaccctttgagggacacagtgaactgcacctcacagtatggtgctgtggttggtgatggtgagaagttggtgtttgctgagagtgttggcaaagtggttgagagtgtggtgagggtggctgtgaataataatgagggaagaggcatttttgcagtgggagaaggtgggggagtttatgccttggcacagtgctggaaaactgttggggtaaaagggtgtagtgattgcttaaggaaagctgaaaatgaagttaaagggtgtttgcctaagagggaagggagggccttgaatactgggtgttatttgagatattcaactgttaagttctacaatcaaagaggtgaagatggccaaggagatggtaagagctgttgctctagtttgaagtttttatattcttcattagtttcttggttccttttggataaacttctcaaccactagttataggagaaaaaaatgaattaaacatctcttgtaagttaaaatcaatttgtgcacttcgataagttttataaaaactctctcgtttaacttttccaaaagctgagatgtataagttaattttaacttacagaagaagtttgattcatttttgctttttatgttcttctcctttaagtatttattgagaagcttatcggttggaatttggaaactgaagctcaactgggaatttaaattgcatattgttaccatgcagtttcaaattccttgtgttgcttataggttaaatgacaaatggagaaggaaagaagtaaagatgaatgttactgtatcattgtgaatgaaatgctgcttttcaactttaactttgctataactcttaggttagttttggtgtctaaagtttgtcctgaatagaatcctaggtttcagttcatagatggcatagatacatgctagtcatttattttgtatacatgttgatgcaattgtccatgttttaatttttcagattcttccagaaaacgagtcattatagcagcagggtcagtctt

SEQ ID NO: 4713 - DNA, 1401 bp, Glycine max
gcctgcagcgcaccatgttcactgaacagtaagttaccctgtattttaaaatgttatatatgttgtcaaaatgagaaaaagtttatattctagtaaactgatatttttccccatgatactgttctagtagctatttacaattgtgcattgcagatatgttgatcatgtcttgaccagcgagagggataatatgagatgttgcaaaattgagtacaaatacccggtgcactcctctcaaacttatatatatgggggaatacttattgctggatttgttgtgtactttgttgtaatttttttctcatctccggtgcgctgaatcgagattttgaagccaactgccaaaaactaccaagtcatatcacactaggtagagcttatcactgctataccaaaatcaaatatcaaatggatacaattttgaatgcatagctgtcaatgcaggacaaatgaaaagagaacaaaattactagagtaatattgattaggttatgtattttggtaggtactggcaggggcttcaggtttagtttacttttgacattcctagaatggtaatagctgaagaaattttatgtgcattatttaattcgttgcaaagtagcggtaatagctgaaaccctaaatttaatgctgaagataccaatgaatttggtagcgactaaaccataaattcaaaccctccagtattactctctcctaaatactagtctttgaagctatgaaattatattagtatttaaagtattaaatatctattaatttagtttctaccttgatatatttcactcacattcagggtataaattgaaagattttgtaatacttgaatagtttatttactttagggactatttagaacatattaatactttaagaatgaaattgatggtttattcatctggtagctaaatattattttaaatgttcttatattttaatggtaagattgtaataaaatgtgtgtaaaacaaattatttaaatataaaccattgagttttttttagaggactattgagtttttaataacttgaaagattgtagttgaaaatattaagttaaattcttttaaaaatcacaattacaacttgcgtatttattttagttttttttgtttgttttccgtagttttttggcatttaagatttttgaaaattgtttagaaaggaaaatatgttttggacatctccatttctcacttttctgggtgacgtaggaagttacgatttaagaaagcaagactttaattcgaagggcactgacaaagctacgccccaaatcttgggtcttggctaatggttaaggatcaaggagtcgttgttgattggcttataagctccaccttaacgtgccaatcttgcttgcctcggccccatccaccaagaaaggacttggattct

SEQ ID NO: 4714 - DNA, 1541 bp, Glycine max
tgtctgcctgcagcctttgcctccgcctgcaaccgagctttctctaattcaccataaacaaaattataaaatatcagttgaatcttgaaaacctgaagcagtattttatgacagaaggacttctgaatttacagaacaaaaattacaatttataagatttaaaataacaaacacaccttctttctgccgcctttcaagatcttctcgctcaatcctaagtttttcaggatctcgcttttcatcctgagatcaagacgttgttaaaataccagatttttttatttaaaaaaattgtaatgatgttgggaaagctttcatgaaagacagcaatgatggtaaattggtaattactagatttgatgatataccttagcagtcacagatctgctctataggtgggaggaagagacaaaaatactaaacacttgaattttttttatgtttttcaaacgtcagtgtttaacccaatagacctgttctattaatgcaggaaattaaagttgcaacacattacccccttaacaaaccttttcaagtgctttctcttgagctttaagtatggtgtcagcaaaacggctccttaacaaagctgcacggtagagcttttcgggagagacttgcctcttagatgcagcactctcccctaaaatgttacagcatgaacagtgagatcatacccccaaaacaaacagcagacagatttcttcaatttttcaagcttaccgtcttgatgactttctgggctcagtagcaacatgccccactctgggaactctgctcaacttggcctcccacatttgttgaatctatataaaaaagagatcatgagctagaaagcaacagtggctgaggcatcctgatcaaaagtaatggcaataaaccataatatgcacatgattactgccataaactttggtactcaccctttccagtttctgaattaccaggatcccctttgttttgatctgaagtcaaatcaaatcctacgttttcctgcaatacacagttttgtttagacaaagatactggtcaaaccagaaaaaaaatattttgtcaaaataccacaacatctaccatatgtatcccaattaccttggtggcactaagaggttctgatgttttagccatatccaactcactaccagatgaactgcctgagtctgaatctgtcagcaacacaattgcactagtcattcgcatgagtcagacaagaataacaaatttgaacataaataattcattttcaagtcattaatttttgccagaatcatgagccaaacaagcatagttgtcagtatccactgaatttataagaatagtgaaggaaaaacatcctgaaaagtgaaaaaatgtcaaaagtatgcactaacacgaaccactggatgaagagccagattcactactagagctgctcaagctactgcatttactgtttctattggtaacatctttttcaatctctaatggaggataatttgaaataggaggatcattcccaccaataatgtcaacatcctcctcaacctgttcattgcctgcat

SEQ ID NO: 4715 - DNA, 824 bp, Glycine max
ttggatgatgtcgattaggaactgtttggttggttcaaccggtgatgctttttgggatgcctcgactggtaatttttcttggccaatgtcgcataggattttttttcgatcaaagtttgtaatggagtctttttggtgtggaggtcggttatatttttctctgcctattcaattaccgcagtccaatgtcacccgaaacgcaacatcggttgagtttgcacgaaataccatggcgaccttgaccgaaaactttttgagcgacaatgaataagaaaacatcctcgatggtacaaaaaatattattggccggcgttggttaaaaataaaaacattgcacaatgtcggtcgaaaaacaacacttatcgcgcttggatttccgctgaggtttgtccacatatatcatttgggtgtagtttacaattgatgtcggctattgtttttctgtttaatccctgaataatttttagatgatgtcgataaggaaatgttcgattggcttcatccggttattttttttgggatacagcaatcggcaatgtttcttggccgatgtcgcataggatttttttcgatcaatgtttgtcatggagtctttttcctgttgaggtcggttatggttttctatgcctattcaattactgcagtccaatgtaacccgaaacgcaacgtcggttgagtttgcatgaaataccataggcaaccttgacggtaaacattttgacgataattttctgtatcgttctaaaacaattattgactggcgttggtgaaaaataaaaaaaattgcacaatgtcggcaaagaaaaaaaaaaccattcatgtgc

SEQ ID NO: 4716 - DNA, 821 bp, Glycine max
agctgtatttgaaagaaaataggtaacaaatacaagtacttaatcattcaatttcatcgtcctctctacactatacaaacttgagggatcagtagcagtaattcatactactttacatgcaaaaaaaaaaaaaatccaaaatcctccattagatcgaatcaaaatgattgattaatttacatctatgaagcacggacaccacagttccttgccgtatccggatatgacaccgacaccgataccgacacaacaccgatgcctgtgttcgggttgaatttgatgtatttgacaggtgtccacgtatccatgtccgtgtcatatccggtgtctgtgttagtattgatgcttcttagatttacaacacatttttctgttagcattagcaaagacaaaagccacacaaagcacttgcactggccgccataatcaggtgcaagcaaagtagtaatcaaagtcattgacagtcaaacagaaaaatctctaaactgagaactgagacaaaaattagttagcataataaatgcgaatttgaactaccccctcttgtctgtgatatttttaaacacgcagaaaggacaaggggcatttgttatctatccacgacgcagtttctaataaccaggctcaaagtctcaagccctcaaactactaatagaacactgtccaaggggggccccttgatactgatgtggattctcccaatttgcttaaccctcttgagtcgttcctttcacttttttctgctacactctgcactctgcactctgcactgcaccctctctctctctctctctctacttgcttgctattgctgccaacac

SEQ ID NO: 4717 - DNA, 1336 bp, Glycine max
attctttaccttcagtaaaagttagctgaaaagaaagtagatgtggcattaacaaggaaaaattccctcacctgtaaattgattgctctgccagatgcaagatgctccaatatgcccatggaaaataaaatctgtgctccggattttccatacttgtgactgattcttagtagtaaagcaagttcagcctcaaaagtgcatgccctctgcaatgagtccagtgaaagactaccatccttgaaccagacaaaataaataaaatcagtattattgtatccgttgtaattggagagcccaaggccttataaatcacacaccaaaatcccatactttcaatgtcaggctcaggtcccatagcttgcaattgaatcctaacagtgtctttggcaaatcttcagaaagattggcgtgctgtgttgcatgtttcaggcttagttatctactttttaatttcttttaccatttagttcttgtggattccttatcctcttgtatttgtatctctccctccttaaagaaaaattctttgtttatttaaagaaattatcatttgcggggcatgccagcaaacattgaactgagttacatcagatatatcatttgggagtcaaagacattaattcctttaactaatctttactgggtaagtgggaattggaacctatttcagcgacgggagagttgtgggctagggtgctggactcaaaatatggtaggtggaggggcctaagtgaaggaattagagcacaggcagaatctatatggtggagggacctaaagcttgtggttcaacatccacaacatggtgtgataatcaacaactcaacaatgtggaaggtgggctgtggggacaggtttaaattttgggaggatgcatggatgggtggggaagaatcgctgctagcaaggtaccccaggttgtatagtatatcttcacagcaaaatcaatacatacagcaaatgggggccttcagagataatggatgggagtgggatttcagatggaggagacctatgttcgataatgaagtagatatggcggcctctttcctaagggaggtcgagtgtctcaggattcaggctcaacaaggtgaccagtgggtgtggaaggcagatccgagtggccaatacacggccaaatctgcctatcgcgttctacgggaggaggaggctgatgggaacctggatggggcttttgaggaactgtggaagcttaagattcctccaaaaatttcggtattcgcatggagactcataagagataggctcccgacgaggtcaaatttggggaggaggcaaattgaggtagacgactcaaggtgccctttctgcaggc

SEQ ID NO: 4718 - DNA, 1542 bp, Glycine max
ccccgtatgctcttgtgtcgacctgctgattaggagtttgatcacaacacaagagaattcaagtgaaggacaagaggcagaaattttaatgtataaataatataaggaaaagaggatggaaaagaagaatggagagaaagttaaccacacataaaagagaactcattcattgtaaattgttgcagtgaatgacacatcaaacaaaataaaattatgatatacctctgttaatccaaccatgctaagttcaggatgagtgaaacaagcagctgggatgcttaaatgattgagcacgtgatcttttccagtgacttgttcaaccactgttagacaattttttcatcaaatgatattgctgcataaactaaattttggaaaagttacatcagttaccacttacctgaaattccttgtgcactggcagcatgagcaagcatcatcttgccatttgcatcaccaatacaatataaatgaggcacctatcattccacatcctatgtcagtaacaataagtcagggagggataattattgcatgagaaattgagacaaaccagcttgccattcgcatcaattactcgcatgtgctcatccactggaacaaaaccacgctgtgttaccacatcaatctgtaggtaaaagttaccaaaaatatacaattacttcctttggagaaaatctcctaatcctaaagcacatctctgtcggaattgcttacattctccaatccaagaccttgtgtgaacggagcccttccagttgctattagtgcagcatccacctgtagcaaagcaaagaatagcaacttgtaataaatctaaagtaattaactatacaggtaaaagaaagggagatcaaacttaagctggttacattctagtcctaattaattaaggaaacaaatcatagaatataatgaaaaatatgaaaactactcctaagcgaccatctaagatactctacaatattttaagatacaataatgatattatgaaatattttctagatattctaaaactcccgcttaagctaaaagcttacttggctttaaactttctacaattaaaaaacacacaaaaataaaattaacaaataatgcagtgagacacaatagcatctagggcaggaaacaggcgtaaagaaaatttaaaaaaaaaaatgcagtggcatgcaatagcatctagggccaggaaagtgtttgagactggagactgggaaagactacacctgggacaaggacaggattgacatcagtcatagccaaaataaataatcattagtatgattcaccaatgataaagagacacaaccgcaggaatcattgatgagataagttagcaccggtatgattcattggtgcaacagaacaaaatagcaaaaccttccaacttgctccccctcaatgctacgttaacattggaaatagccaaatagtagccaaaatcatggaaaaccagaaatagccattacaaaaaacgccaagtaactatccaaaaacatcaaacctaacagactaactaaccaccaaaatccaaatacaaaa

SEQ ID NO: 4719 - DNA, 765 bp, Glycine max
acttgcatgcctgcagcccaggtctaattcttaattatgcattaatgagtgtatgttcatacaaataaacacatataacggtattatataactgctggcagatgttgaagttacgttcgccttttcaagcttggacaaggcagaggcatatgatcctaagtgggtaaaggcgcaggatctatgtgctgaaaagggttcaaaactacagggtggggttggaccatttggacttctactttggcttctcaaaatctggaagagttcactcctttgtttttcagagttttcaaaagtccaaataagcatattgttctcttatgctctgatgcgagaaggttagtctattccaaattgggatgagaacttctagttttctttctatcttcatgataggatgggttttaggaccaaaagagatcaaataagtgattggagaattgcatttgatagggttaggttattttaattatatgttattttgttattttgtatttccttcgaattggttatttttgtttttgatatttctaaatagttcatctttgaagagtgatctgtacaaaccccaatttgctgggtttgtagatgtggatttggccacagataaaaagatttttcttaggagtttggtatgtgcaaatttctttccatttggtgcttatatatagcatttatgagctccaaatactaatgtataaatatttaatatccttggtttttcaaatgaatggaaaattgatcacttcattggggagaagtttggaa

SEQ ID NO: 4720 - DNA, 860 bp, Glycine max
aaacactagactgtgatactcagcctctgtactggaccttgcaacaacagattgtttctttgaccaccaataaactaaattggagccaaagaagatggctgcaccagaagtagatattctgtcgtcagggtcagatgccctgtcagcatcatagtagcatgaactgtaaagggaggtcgagtagagggagggagaatttgttttactgctctccaatgctgttctgatggatctgacatgtactggcagattttgttaacagagaaactgatttcaggttgagtgatggtggcattctgcaaggctcccacaatagacctgtattgagtggggtcagggaaaggctcataccctgacttagtcaacttgcagccagcctccaaccattcgagaagaaataggattggcctcatccatttttgtttttcccaataaatctctaatgtacttatactgagtcataattacctttctgttgggatgatggatagtttttaattacctttctgttccaggagatcttacctcctgtggctttttgtagtacttctggtactatgtatcttttattatatatataatatatttttggccgttcaaaaaaaaaaaaaacttatactgagtcagaattagagcaccattgggctgaggtctgacttcaattcccataaaatagtcaagactcccctggtctttgagtgaaaactcagttttgaattttggtgacgacggacttgatgaatataggattgttcctggtgacaataatgtcatctacatacacaagcatgtaaataacagtatttttggaaatcagtgtaaccaaaagtggaggatcacacttgctggaccctgactga

SEQ ID NO: 4721 - DNA, 804 bp, Glycine max
cctacttgctgcctgcagtatacatcttctccaacacaaaagcacaacatggtggaggtagctcttccagcacgatttattttttttcatacacaagaattgaattcgagaacttaagaaaattcaaatatataccacttgaactaacagttgatcgataaaagcatatatgttaaatagcaaggaatttggataacatattttaaaaaattgagcttacactttttgcctcagtatttggtaaagaaagcaacatacctgggacacgatgacaaggataagaaatgcagggagaccaatttcagcgcaatctaccatctacaagaatcaaaagacaattattaaatatgttaccaatatatatgataagaaaagagcaatgcatgttctcttggaaaatgctaataggaagagtcctaggccagtcagagtgacaaggggaaccacactaaaggggccgaggcacctgcaatatcagtatagttaataacttaatattagtgaaatttttctattctaaaatatagctgatttttttcaaagaagcaaattgcactataacgatcaaaagagattctgaactcaagcatgtacattacctggcaaaaagccttccaaaatccaaaaaagccaatactgatttgaaagaccgatgcagtaataagtgccccttgtttggctctcatggaatgtataaatttctataagaaaaaattccaaccaagaaaaaaattgatattagtgacatgcactatcacttttatcctccaaacagctaataaaaactaatccttttccaataaa

SEQ ID NO: 4722 - DNA, 785 bp, Glycine max
aaacgaaaatgacactagtctgtctcaacctgcgccatgccaaaaaaaaaaaatagcatttcaagcatcgtaccctcactcatcatcatgtttcttgattctctgcggtgcattataagagaaaccagctgagacagattattataaacattaacaaacgagagaagaacgagagagaaacaatggaagcttgttcttgtggaggagaaaaacaaaacatggatgagtttgaattcgaacttcatcgcgttaagcaacaacttcccagtgttcagtactgtgttgccagttctccctcatggcgtacgtataattaatatcacaataatcacattgccaacccttttagttttttctaccttaacttaattaatacttaacacttcacagtaacacacattttttttttggctttcgtttgaaaattgcagctgaagggattcgtgttgggtttttgcattgcttggttgcgcttgggaccaatgtcatggcttcctccacccttgtacctttaatgggtggtgacaatgtaataaaaaatttacttctcttaatatattgcattttcatgtatatacctatttgtttagtcattttaatttgtttcactaaaatttcttctttcttttgataataaaaaaaatgaatagtaacccttaggaggagaaggctcaagtgatagagactctactttttgttgcggccattaacacactgccgcaaacgtggtttggaacacgtcttcctgtggttatgggaagctccctatactttcctcattcctg

SEQ ID NO: 4723 - DNA, 1806 bp, Glycine max
accaagctgcaatgttaccgtgtaaacattctcatatgttctttatcttcaaagaaaatttgcactgatgtttatttgaagttttatttatgttcataatagtaagtcaagatcacctcccttttttcaatgtgtaagttgtagtaagtttatttgtctaaataaaaagaatgcaactcaacttgtagcctcttgagtgttgtaaaacttgtcaatgacaatcacaattggtttaacttttactgggataaatctttgaacaaaatttctattctgtgcagcatgttgggaaatatttcaagcaatctgccaaggcttttgaacaacaagttgctcgggaagctaggttttatggtgcccttatcaggtgaatttcctttcttaactttgcctttactattaacttatttgggttgatgctgataagaatttgggaacatgtttagatcacaaataaccatgtttcgttgccttcaaaagctggttctcaagtaacttaacacgcatctgtattcatttcatcaataatttaaagaaactcactataggagaacgctagcttactagcttacgtcactagttatcaaatgacctgatatgtggacaggttgcagcaaaattggaaggttaaacggcaacgtcaggcagctattgttccagggaatgaaggcttcacctttgatctctttgataactcatacgaccaagcagctattattcgctcattgtctatgtccactgttcgagtcaatcacgatgcagctggaatgctggcaataaatgtgtctcctgatttatgccattctctccaattgggttttgttggtgtacaaacagatgatacacggaggaaatccaatgaaaacaaatcccaattttcaggtgagcataatttgggagaaacaggtgaagagtccttaagtgatgaagagtgtgttaagaaagcacattcactccttcgtgaagtacatgaagctattttcaatgaacaggtaattcactcctttgttaagaaaacacattcactcctatcaataatttgttctttcattattgttgttgttggtttgcttgtctagtttgtccaatatcctcacttgaacatttcttggtggtggtttgtttctttcgattcttatgcttccaggtgtttgatctggtgaatcaataaacatttaatcagttgcaggtgccagtgtgattggaatacgggaaaactatttacaattaagcttaggtcaaggaacctctgtgtacttaatactagtgtccaatagtcaagatcattctacagttgaaggtgaactcaccgataacgtagaaaatgcaattttacctctaagaaagggcagttttctaattccatctgtatgggggagggatgttgtacgcagccttacccttgcatatacaaagaggctgtttccggattcgaacccatgaccaacaggtcaccaaggcacaactttaccgctgcaccagggctcgccctcctttctaattccatctgctatgagattgatattcaacagatttttcttgaacatatatttggaaaaggtggcgaaaaaccaatttccgttggaaatcgtttgtctggcgtacaggaaaaggatgggtccagtcttcttggtcattttttaaaatctttggctcacaggatattttcaacaaaagttcttgcagagctggaaaacgtggtatgactctttccgaagttggttgtaaaatggacattttgttaagttttttatacctgcaggtcgatcttagagatgcccgggtacgagtccgatttcgataaat

SEQ ID NO: 4724 - DNA, 860 bp, Glycine max
atttttcacttagttgcttttgagatcgtgatttattcttgtctcgagaggatatggaagattctgtgattctgaaacaaacacatgatcaaatgtcagatgtggcatatatttatgttttccaggggtggataggtatacaaacgaaaaagtaagatcattaccttgcttgcaactcatgaataccttcatacagccgatctgcacagctccgaaaacgtaatataagatcaaaaattacaaatagtgacttgtaaagagactgggaaagctctccaaggagagatttctctacaatagaatgcagatatttttcatgagcagcaagtagatcatcaaggtccttggctagttccatctcagccaaaaaatttgaccatgatacctccaacacttcaaacattatataatattgcaagtttgaaatgaagtgattgatttcaacccacagaacctgacagcgcctcaatgtcgaaactaactgcatctttactgcatgttgcaatctggtgaaggaattagaggtaatgcagtttggcttcatggtcttccaggctccagtaagcgcatgttccactcgtctaagcttccacagaaaattaaaaattcttaaataccttgtcatcacagattccgtgaacaccgtatcaagtggaactctagcatcatattctaatgaaaatacatcccagcccctatcaccacttttcatgtggcatcattttaaccctgagcctatccaaaatgttcaggatcatcatactgagcattagatgcccgattgcagtttccagcatcccgaaagtttaaaagagcttatagtgttagcccgctccaaaagttcaggcccaacgatattc

SEQ ID NO: 4725 - DNA, 783 bp, Glycine max
caactctgatgcctgcagcactattaacatatattcttagagaacaaaaagagttatcttcaagcacctgtgtcacatttgccccaggcatgtaattatactaacttcacaactgaagttattattgaattgagtaatgaacattactagttgttcaaattacattgaattaccctttcatttgataatggtcaaatatgttggtgtttgaaatgagctggagctattgttataatcattaatcagtttgggctgtgatatgagatttcaaatttctcagtcaatcactattgttttgacatacaagcatgagatttatatatctatttagtgtgatatgtattgtaatttatgtgagaattaattattttgttacgagtaggaatgcctaattaatttgacatgatagttgcaaaattaaagttgaatatctattttctttcttcgaataaacttgaagaagatatgagtgaagtaagaatacctattttatcattatacattttgcttatggaattttctttacagcgttgaaatttctctaatattggagtcttgcctatgttgtaatcattactgctaagacatttcattgttgtcatttttgcagctgcttgtatgacatgggagttaggtgaatcagggaagcacttcatcactaccattataaatggttacgacttggtacccacattatcagcttcctctgttgatgatctccgatctgaggtgattagttagttctcccagatgattttggcaatatcatcattggtaattagt

SEQ ID NO: 4726 - DNA, 1275 bp, Glycine max
ttgcagtccaaggtcctgacaactcacctttagaagtacaaataaggacacaggtgctaagttatttcacatgtgttgcagaggttacttgtttatattttagttcttgatattttcatttattattttgcttgatagaggatgcatgagtgtgctgaacaaggacttgctgcacattggctttacaaggaaactggcaatccttttttatccatagacagcatggatgaacctgaaactgaagcatcctcctatttctccaaagatctagaggaaggaaattcttcagatattttattaagtaaatataagtcattgaaggctggacatccagtcctcagagtagaaggaagtcacttacttgctgcaattatcatcaggtacataacactttcatttctaatggatattatgttataaagctatccatactgattgtcacccatgttcattatcttttcagtgtagaaaatgatgaaagagaattgctagttgctgtgagctttgggctagcagcttctgaagcagtagctgacagaagatctttccagattaagcgatgggaagcttatgcacgactgtacaaaaaggtttgctgcttaaattaacacatattaatattgatgtgacttgagtatagatggctcgtgatgaatggtttatggaaagggcatggattgactaataattacacttaatgagaagtaaatgtcttgatggatctctatatgcggtagttaagcttaccaactagcttcctacgtgctgtattgctctctccgtgtccagatcctgctgttgtgtcatcttttcttttgtattgtattttaatttttaaattacctagtaggttgcttactgttgacctgtttcaggtgtctgatgaatggtggtttgaaccggggcatggggattggtttacgtgtctagagaagtacacactgtgtcgagatggtatgtatcataaggtatgtttttctaagcagttgagaatataaaattacacactacactatagttttcattatttttgtttatcaacaacgtagacagcctctttgcatatgcaagggtaaggctgcgtacaacatccctcccccataccttcgcatagcgaagagcctctaggcaatggggtacgaagtttttatcaacaacgtagacacaatgcatacatacactgaaaaaatttcatttcttttagatgtgctaatttatcctttgcgcactaactgtattctagttcttagtgatcagcatgtgttggaaatgtat

SEQ ID NO: 4727 - DNA, 718 bp, Glycine max
ttagggatggctcaactcatcagggtacagttacatcgatggagcctaatgaaggcacttttattcttcacaatgagaaaaccagggtaatattttagcctgccactctcatatacttgcctgaatgtatagttctaagcatttttcttctactttaagatgcaaaaaattgtgcctcccacctctagaaaaagaggtgataagcacatttttccttgtttgggatatcatagtagctgaattatatcaatcttatttcatatgtttgtttgttgattgtggaatcagacaatagaattgactaaatgttgtcttatatttctttgattttaacagaagggcaagataaagcctgttcatgttgttgatgttcctgggcattctcggcttcgacccaaactggatgagtacttgcctcaagcagctggggtagtttttgtagtagatgctttggactttttaccaaactgccgtgctgcttcagagtaattccttcctccaaattcagttgctagattaccatctttatacgaagtagcacttttagtcaatattagcagggagccactagtaagccatgatgggaaatatcagcgtaatatctagatattttagcattataacattacataactgaccatttcccactactcctgaggaaaaaaggatgccggcagatacaaagatactaacattttcttttattttattaggtacc

SEQ ID NO: 4728 - DNA, 689 bp, Glycine max
ttgcatgcctgcagtgtagtgtttggaatagtttcgtgtaatgttctgcatagtgtgaagccgcctcgaaaatggtttggtggtgtctactagttgaatattcttggatttgtctctttgtttctatgtttcacttagttttctaggtttaatttgctgtgacttgcgcttgggtcttacagggaagataagcaacggatgtgactggcatgggaggctgtggaaaagctgtgtggcggaagatttctgtgtgaagccttaggttttattacccttgcattcatcattttattgtttgtttgttttggactggctatgcctatccagtttattttggaatttgatctagttgtttgtcggtgtaagtataataacccctctgttagtgtgggagttcttgtgtgggtttgtaacaggaacaatcaaagtattatgcatttggggattgttacaatgtcacaggaagaatttgggacagtgtgattgggtggttgactctttgattaaaaaaacttcgtaccccattgctcagaggctcttcgctatgcgaaggtcggttgactctttgattggtttggagaaattctactgctccttttactgttttcttgataatggtgatgttcatattgcagtatgctggagtatcaattttgcattcattcttcatacagaagattagaactgct

SEQ ID NO: 4729 - DNA, 1523 bp, Glycine max
atcctctggatcgacctgcagaaacaggtttacaattcaatccgtgtgtttcgtgatcaagtccaggggaaattgaacaatagaggaaaatcaaagaagaaattaggtttatcgagaacagttagccgtttaaatccaatgtatcaggcatgatatcttttttatattttaatcttcaatgtgacacagtaatcttaacatgctgcaaaccgatgaaactaaaacagttcaaactccatcaactattagatagatgattatccttgacgaaatgaagaatgatgctctataattcaaataattgatgtaaaaagtcactagactatcaatttcttaagatcttcaattccaataaaagtgtatcaatcggaaaaacacaaactcgattaagatgggaacaagcaagaagcataacaatacacttaatggaaaaagaaaaatagaaccgagagaaataatttccaaagatgaaagaacacattgacccataattgcagagataaataaagctctcagtaaccattgaaaagcaaaaatcaaatccaagattcagaatccggagtagagatcaccaaatcatgtaataagacagccactgcttccacacaacccacaccacacattcactgatcttcccagagagatcaaagaaaaaataatggagaagtaaataaagaaaagctcataccaaaattacaaacgaaaggcaaaatctgataaatcatcagaatccaagtagtagagaccaccaaatcaagcatgaggctgtaaacgcaaaacccattcaaacactacaccaggaaaaaagaggttaacaactcaatccatatgcccccatgatcaaattcagaccgaacctagaaacaaaacaaagggattccatcgaagaaaaattacattatctatactttgttagcagttctaatcttctgtatgaagaatgaatgcaaaattgatactccagcatactgcaatatgaacatcaccattatcaagaaaacagtaaaaggagcagtagaatttctccaaaccaatcaaagagtcaaccacccaatcacactgtcccaaattcttcctgtgacattgtaacaatccccaaatgcataatactttgattgttcctgttacaaacccacacaagaactcccacactaacagaggggttattatacttacaccgacaaacaactagatcaaattccaaaataaactggataggcatagccagtccaaaacaaacaaacaataaaatgatgaatgcaagggtaataaaacctaaggcttcacacagaaatcttccgccacacagcttttccacagcctcccatgccagtcacatccgttgcttatcttccctgtaagacccaagcgcaagtcacagcaaattaaacctagaaaactaagtgaaacatagaaacaaagagacaaatccaagaatattcaactagtagacaccaccaaaccattttcgaggcggcttcacactatgcagaacattacacgaaactattccgaacactacg

SEQ ID NO: 4730 - DNA, 682 bp, Glycine max
atgctacaactgttccacagcacaacattataaggcaatgctttccaagtttaaactaacaaatacatgggaatgctattttgaactatttcagactcacgacacaacaacaacaacaaaagtcttatcctacttgatgaggtcagttatttcaaactcatgatagctcacccaaaaactacagatgccgaagaatttgttgtcaaggttccctcaaaaataccagcaaaatgcatcaagtctgagacataatagcctgatgtcccactaccatctccatactgaaatgtgtaagtgcactggttgttctgactggaacagcttgcatccgaggtctgtactccactcctgcaccttcggtctgaacaagagatcaacgaagatgttgatgaactccgaggatcaaagtaattgagctgaatctgcaaccaaatccagcaatggtgatactcaattagtattcacatatcccaaaagtacattgatcaaattgtcataaaaactgagtactgaattaactataactaactaattaatagggagcagggaaattaaatttacttggagcccacttgtctgaggacaaccgttgcaggacccacaactaacccagagaacatcactgccagtgtcaatctgcacatagaattcccttggaggagtacccaatttcacctttgta

SEQ ID NO: 4731 - DNA, 869 bp, Glycine max
ccacctcggttacccggggaatcctctgggatcgacctgcagataacccaataattatttggcttcacagttgttaaaaatcacaagttatatgacgcatcatttgcagaacagaacttctataatatataaatatgcatctaaaaacaacaaccacctccaagccttttcccattggtcaggttaggtatatggatgagacaccataatgttatatagtgaatcacatctacaaacaaaccactaacccataaatcttaattaataattttgcttattaattttctaagtctaagtctcccctccaactttaatgattaagctaccctccatctaatctactctctttactaggattctgatgtcttctccacacaagtccaaaccatttaaaacgagattctataatctttttcagataagttgcaactccaactttaccagtcttccccgtgtatgcatataaacaattgctgtaaaattaaatctcaaaaagaagaccacaatgttctaaaattaacaagatgataataaagtaggacattttcatcagtagctgaatgaatatcctacacagttacctcaagtgtgcactgaaaaacagcttcaaatatgcgaggtacatcttcaatcattgcagctttatatctgggagagagagggcgagagagagaatgtcacatgcagttattcataattaaaatagcaaataaaacaccctctaccctgaggaagaaacagaacatatacatacagaatttggatttcaaagcacctatacaccaatcaacaaaataaaggaatgaggggaaaaaagacaaaagcttacttgttaacaattgttgcaaaaagtgacaaaacctctgatt

SEQ ID NO: 4732 - DNA, 762 bp, Glycine max
aggttgctgttaaaattctgatggaacaagacttcaaaggtgaacgcttcaaggaattcctgagggaggtatactctgaagttcttatcttgttttgtgcagcaaaaacaccaattgcactttaagttttgcttgctattgatttgagctgtatttttacctctttcactaggttgcaataatgaaaggcttacggcatccaaacattgttttacttatgggtgcagtcactaagcctcctaatctatcaattgtcacagaatatttgtcaaggttttacaatatctcatctaccggttcctttacctttcctcctataagagggatctcttttcatggctataaaatatcttacacttgagacctaaaggatttgattgaactgtgcaggggtagcttgtataggctgttgcataaacctggtgccacagagatgttggatgagagacgtaggcttagtatggcttatgatgtggtaaactttaagaaaataaacatcaattgttttcagttctatttattttttgaattaatatgatgtcataacctttgtacccattggttaagtatttgtcattttcatgtgcaggctaaggggatgaattatcttcataaacgcaatcctcccattgttcatagagatctgaaatctccaaaccttcttgttgacaagaaatatacagtgaaggtaagaatgaaattttctcatgtctgaaaaatgttgagtttcatttaatccgtaagtcacctttcgtagtcttg

SEQ ID NO: 4733 - DNA, 700 bp, Glycine max
tctcgtcaagaaagcgtaataggaggcatgccacccaaaccaatctcattgaaattagtggaattcacacctacaagctcctatagtctatcacagtgacttcgtcttctggggcatctagatcttcataactgcaccaccattaacaaaattagtaaatgtttcatatttttcaaatgctactagttattttgttacatggaaaatccttcagaacttcaataaaatttccagggaataaaagcaaaggaaaaaataaaaggaacttatttgaatatataagggaagaataagttgagtactgaatatagtgaagcagtcttggaccaggtaaaaagggcatagaaagttgaaagttaggatgcagattgaagtctaaagatcatacatgaacatggaagagatagtattacgatttaggatccagcaagggaaaatctgaacaaaggtcctacagaatgattaccttcgcatccgtcgaggatcaggtctaaaggatggaggaacagcaattataggtgctggtccacccatatgaggaccagatcgcatcttccttcccgaggcatcgaatgatgtaggtcctccttgctccctgaacatctgcattgcaacttctggtggagcagggacaaagggtcccaaaggcctgtagggatgcaaattatataagcaccaaccaaaactcaattaaagaaac

SEQ ID NO: 4734 - DNA, 825 bp, Glycine max
aacaatcaaagcccatgctaatggcccctgcaaaagctcttgaataagacacaattgactgatgaatcattctttggccaaggagtcaaattaccatggataatgctcttacctccgcaaaagaaaagcaaaccatgaaaagcttctcatttgatgagtaaaaaagaagatcaatcaaaaatattgtattggcataatagcaaaaatcctgaaacatgggcaatcgtgtaactaaactttcattgcaggaaactcataaaacaataatatcagtactgtatctgcgtgataatgaattagtgattaatgggaaaatagacactattctaactattttaattattaacacatggaaacacagtttaatatgacaatgcccttgtcattactattagagcttccaggtctaaaagatctaaccaatcagattaatgtcttaaaaattaatccaatcaaattaatcacacagcataactatgttggtagttggtaattcacttaaccattctttttgctaacttttctattgttaaaccacaatacaccatacaagtacagtgcacttcaggaacagaatttgtgatatgtcagcttaccagtagatagtaatgccatttcttggacctatagtatatccaacgaagaggaacaaagatgacgtaaaacaaacaatatacatagggaatatcttggggtcctgccaagaaaaacaaaatggcaaaaaagaaaagaacgaaactaaaaatccacatttattgaaaaacattccacaacactgcaaatgcatcagcgagacttgtcaacttacgtgcccctaaaaggaaa

SEQ ID NO: 4735 - DNA, 817 bp, Glycine max
  misc_feature (749)..(749): n is a, c, g, or t
  misc_feature (753)..(753): n is a, c, g, or t
tgcctgcagcagaaggttcgtgtgcatcaactttgccccgacctttgctcggttcaacttgatggaaaatccatgtgcgagtacctttcgcagatcaagagcatagcagatgaactcgccagcgttggcattctggtgaagcatgaggagtatgttgatgtgattcttgtcaatcttccacaagaatatgcactggtcattgctgttattgaaggaaatttcaaaacgcctccggtcaatgaagttgaggctcaacttctttcctttgagtctctcaacaatcagttttgtcagcagtcctttccgagggtcaattacgcgtcgcacggtggttctggaactcgcggtggctcctctggcagtcgtggtggctatggagcctccagtgttagtcacggcagtggtagtgtcttggaacacggtggtgcctctgattgcagtggccgtggtcgcggtggtcgctttgcaaactttcagcgccaaatctgtttaaaatttggtcatactgctaatgttttccatttctgagctgatgaatcctatcaaccaccagattctatggtgttgtatgatccaacaacacagcaacctgtcaatttcaaaagttccaacatttggacgaatcctagttacaaatctgctgctcctagtgctatgatcactgattccacctctcaaggttcttctgctgaagccaacacaacttggatcccagactcaggtgcctcgaatcatgttactggtgcagntcanaactcactcattttcacactttgatggtcctgaccagatctacattggtaatggtcaagttttg

SEQ ID NO: 4736 - DNA, 661 bp, Glycine max
aaaagcaaagtcccaaaattttaatggtaaagaagcacgatgcaacaaagtgagaccacttttggcaatatgtctatgcttcctctcaacagtcccattttgacgatgagtgtgtgggcatctaagtctgtgagtaatgccaagagaggctaaaaaggatgtaaaaggtctaaattcccctccccagtcagattgtacacttttatcttatgattaagttgaagttcaaccatagacttgaagtgttgaaacagagagcctcagatttttcttttaagggataaatccaagtatatttggaaaaggcatcaataaaagcaatgtaataactataaccagaaaaggaatgaaccccataagtctatgtaaatcaactccaatggagtactgtaaacagaatcagaaagtgcggaaggtaaacaatgagatttgccaataacacatgatttgcaaaagacaaaggtatttttatttactaaaccaagtttacattgattgagaacaagcttcagtacatgtaaatttggatggcctggccctagtgtgcccaagagtactagaactagaagacaacagcaggagctggaacatcaacagaggtgacagtagccaggaaatgtacagggacagaatgtacatcagccttattcttgcaggggaa

SEQ ID NO: 4737 - DNA, 847 bp, Glycine max
ttctgtcacaacctctgctgtcctttcagctggtttaggtacaggttcagttgtttgagtgttatggttctggtctggtaaggtttgttcaagtttgtgcagaagtagtgcaagttcggttatctcaagagccaaaggttggtattctgagttttcagttggataggtgtttggttgctccccctgaatgccaactttggggtaatagtgctgattttcaaagaaggttacatccctagtgtggtaaaattttttagtatggggagagtaacacctgtatccttttttatgaggagagtaaccaacaaatatgcatttgatgggttttgggtccaatttgctacgatgagggtttaggttgtggacaaaagctgaacatctaaagatttttaatggaatggaagaaaatattttgttggttgggaagaaggtttgaagtgtggagaaagggatcttaaagtcaaggatataggaagacattctatttgaggtaagttgctgaaaggacggcttctccccaaaattgttttggaacattggaggctagcatgattgctctagtcacttccagaaggtgtttattcttttgttccacaaccccattatgttggggggtgttcactcaagaactttggtgaacaattccaaccttttgaagatacgaatttagagcaaggttgtaacactcacgaccattgtcagttttgagtacctgaatcctgctttgaaaattgtgtttgccaccatattgggaaagatttcaatatcctggctactaatttttcctttcttagaaacaccccagtgacgcgtgtgtgaacatcaataaggtgacaaacctttttga

SEQ ID NO: 4738 - DNA, 807 bp, Glycine max
agtggctcaaagaggtaattttttacatgccctaaacactagcaaagaaagaacaaagtcatggatcattgactcaagagcttcagatcacatgactggagattttactttgtttagtagttattctccatgtccctataactatactgttcggatagctgatgggactcattctaaggtcatgggtaaaggatccaacactatttcacaaaatattacacttaaatcagttctgtatgtgccaaaacttgattgtaacttgctgtccattagcaagattacaagagatttgaaatatgttactaaattcttcccaaacctgtgtgaatttcagattttggagtcggggaagacaattggcaatgctgaagagtgtgctggactctacctccttcaagttgaaaaaccagaagaagaactcaagaaccattcttatgtagcagcagcagttccaagtagtgataattctgtcatgttgtggccctatagattaggccacccaaatttcatgtacttggaaaatatgtttccctcactattcaataaaaacaagaaaaatatttagtgtgaaatctgccaattatctaaacatacacgcagccattacccaccccaaccctatcaaccatccaaacctttctcactaattcatagtgatgtacgaggacccatcaagagttcacaacattactggctcaaaatgggtttgtcacctttattgatgatcacaacgcgtactttggggtggtttctaatggaggaaaaataagtaggcaggatatttgaaatcttcacaatagtgtgcaa

SEQ ID NO: 4739 - DNA, 854 bp, Glycine max
aaaccctaatttcctctcccaacaactcatgaccaatgacggggcaagattcgtgcctgacgacttcggccatgccgccgcccgcctcgccgtggcacagctttgcgatgccacggagttccatggcgccaccgcctcggctctcgatgccttcgccgacgttgccgttcgcgacctcctcgacctgggccgaatcgccgagtctcatgccgaccgcacgcagtgcaccgtcttcgacacaattcgcagcatggaagacttagaagcgccacgagccttcgccagcgccggcggcatcagagagatcataaacttcttcgaatccgctgccgacaaaatttcgttcgcccaaccgatttctaatttttgggttgtttaggaatgacgccgcatcatcccgagttttgatcagatgggtgaggctccaccggcgaagcatatacccacgtggctacggcgtgagagtggctaagagggagagagagcgctagggtgtgcgggagagtgactgagtgaggaattttaattcctttattttttttgtgagaatttgaaatactgtcaaattagtatattaaaatgttttacaaaaataataacattttaattatttttaaaatatcctatctaaacagattattttatagggaatattcactttaattcctccctccaaacaatgtataaaggaaaaagagacaaaatcagtggccaggaaacatttctttggtaggttaactaggaattcaaccttggttttatgacatcttggttccacaattttctagggtatcatcaggattggttctgtccttagtataaattacatggttcttattaagcctatgcaaagg

SEQ ID NO: 4740 - DNA, 841 bp, Glycine max
tcagcctaatcgagtgtcttaaaactacatgagacaaattatacttttgtttcaaggtgggggatggaaaggtttcaaaaacaatggaattgacatgacagatgagttaaagactaacaaaaaagagaaggcactggtaaaggaacgggcttttccttgttctgccattgtagaaaattgatggacgatgctcttttttctattgaatcctttagatcttgaagagtaggccaccatgtgtcgcaaagaagggagcaaacacaagagactcaacggccatgagcttgataaggatgttaagtgaaggccctgatgtatccttgagggggtctccaatggtgtcaccaataacagctgccttgtgacaatctgacccttttggaccaaggctccttgcatgctcagaagcaccagcctaatacattacaccaaatacataaacaatcaaattcagattacagatttcattacacaactaccaagttgccgtgcaattgtaccagcattttaaattgaagaatagcttctggagtgagaattcaatttaataatacagcttggcataaaatatttacctcaatgtacttcttggcattatcccaagcaccaccggtgttggatgcagaaatagcaatctgtaaacatggaatggaaaatatgtcttaaaaacaaaaaaataaaaggggagaatgacaaaggccaacaagtaattgaggttattaaactagtaataaatagtggtggatgaaacatcaactgtacaccagacaccaaaaatccagctaggacaccacgaaagtgtttcgacaccaaaaaaggattccaaccacagggggggtaa

SEQ ID NO: 4741 - DNA, 741 bp, Glycine max
atggaaggcagctcctagagtcatccaaaactgctttagacaagggaaagcttgaggatgcagttacctatggcacaaaggtatctacgtccagaaccctttgtttggaaatcttcaaagtgtcgacaaggtttttcaacagtctacacctttcatttcagaattgtcgtttgatatctgctataattcgttggtgacaggctcttgctaagctggtagcagtttgtggtccctatcatcggatgacagcgggagcctacagcctccttgctgtagttttatatcatactggagacttcaatcaggtcttatttgtctcatttatgttttggtattggtggacattgtttcatcagaaaccattatttacataattatattcaccaaaaaaaaaaattcgacattctgttgaaattttatcaaatggaaaataattcaattaaaagtagaggaagggtatagtccagagcaaactactggtgaaacctttaaaaaggacctggctccatgtaatttggtttttaatagggcccaatggtcaatgacattctttggtccatgttattgacaccatcccatgggataggcttgtttgtttgctttatgcaataggcattttaattaaatatttcagccattgtttatgccaaaatatctattctctttttgatttaatagagtttcaggatttgatttcaattcatcaagtttttacttaaatcgcaggctacaatttatcaa

SEQ ID NO: 4742 - DNA, 698 bp, Glycine max
tgatgataacaggtatatgtgcttgttatgctggccatccataattaaatattttacactatttattaggtttgttgcgactgtttttatgttctcatacttttatgttgtgctgttgtgtttttaaacctttgtgtatgggtaccagtatgtgattcgtggaggtgcggtatgcaatacattactttttaatttttatgttgttattagaagacttcctttaacccggaatgcagcacgtggtatggtgaatttggtacacagtatgcagggctttttcgggaattctgcaactatgcctttgttttttaatgcattgtgtggctgaatgttcatgattggctggaagaaacaatcccttagttgtttttgtgtttgtctggattgtctctaagattgtgatatttgatggtgcaggttatgataaagaatctggagcaggtattgtcaatgattttaaattcatttcacgatcctcaccctcgagtgcaatgggcagctataaatgcaattgggcagttgtccacggatttggggccagacttgcaggttaaatttcaccacttagtgctgccggctttggctggagccatggatgattttcaaaatccaacagtacaggtttgtattgttgtgctttttatctggattaagtacattgtctccttttgtaataaatcaggtcatgctcttctttt

SEQ ID NO: 4743 - DNA, 794 bp, Glycine max
  misc_feature (770)..(770): n is a, c, g, or t
acaattggcaagtatatgttttgattaataaacagtaatatatattctttttaaaattggcatagttcccatgatgggtaatgtggcttgggtgaaatggcacctgcctggatcaaacccaggacccaggacaaagaggcaattctacctaggccaatggcaagtttagcaataaccagcatagttaaccatcttcaacatgaaaaaaatataagaacttcaacttttagctgcttgtctaacttgaatatgttgaccaaaaaaaacttttggtctttgttttgtacaaatcaaaattttcatattaagtatttttgggaacataacaaaccttaatcaaatccagcattctctcaacaagctcctggtcatctgaagttgctaaacctccagaccaaataaaaacagtgggtccgctatgaagtatgtagcaataagtggaattcaaggaggaagcaacctggttgacaaaaggaatgtgaaaagaaacattgtgattatttaaataaattatgtattatatatatatatatatataaagtttaaattgcccataaaaatatagtgggtagaaggtagctgctataaacagacaagatgacttactggttcaacttgtatagcttgcatattgtctggtcccagtgccctggatgcggaataatgcaacaccatcctcattgtatgtctcatctggaatttccttctccgcaatgtaattcttgtatccatcactaagtccaccctgatagacatttaaaatgaatgtnccatactaaaataattatattcct

SEQ ID NO: 4744 - DNA, 815 bp, Glycine max
gttatcccggggcatcctctaaaactcgacctgcagttgatactgtcaaatctttctgatcactgcaaaaggaactctctgatgatttaactgtcttcaattgctttggtagggtaaaagcctggtcagtgtgttttcctttaaccactggtttgttatcgtcatctaaggcctacagggcatgcacaactatgatgagtacaataattggacacattattatgtaatgtaaaaaaaaaaaaaaaaaggactggtgtgtagcttcacatgaaagcaatttcatgtgtatttctattgtacatcaaagaattttttacaataccaatttgtgcctatttatcaatataaccatggtaagcatgactaatgataccaaacttaatgtgcctatccatcaatgaattttgcgcctatccgtcaatgaattatgggaacaaccagttcatatgacatacactaaattgagcaatgatgggtataagagaaatgaacaccaaactcagtgtggtttaacctacagcaaaccataggcatatatctacaggccaaacagagaaaactctggtcaatgatagccatttggaaagacatatggaggggagatgatataacccttaaagacaaataccctgttttatatcaggtgagccagcagcaggaccttactatcagtttaatgggtcagcatgctgaaaatgggtgggattgggaagttccaatggaggagaaatttcttcgaccacgaaattgaaatggtggcagctttcatggatgagaacgatggggtgcaactcacctttctagaatggatcatc

SEQ ID NO: 4745 - DNA, 756 bp, Glycine max
ataggagaaaaagtacaaggcaaaattgcctaacccaactgaaaatacaggataacaatagataagccaaaaggaaatcatcccttaagacaactcctccctcaaactagtggaccattgattaaaatgaatatggaagtctttgtccatatattttaaccatgcccaagtgtggaataaagcttcgtccatgacttttccggagtcgaaaatctggttattaaaaaccattgaatttctatgcttccaaatagtcatggatagagctatccaaagcactgcccatctattatctatacatctattgctactccagcttgaaaattgaatgaagtggtctttgggatcagtggggaaaggacccactctgtcagcccatctcaaagcctcccaccaaagactcctagttcttgagcaagcaaacatgatatggccagcagattcctcctctccatcacataaaggacaagaatacgatggaaggcacacctgcctccttcttaggttagccttagtaggcaatctatctttaaaaattttccaagagaatgcagctgctcttggaggaattttcaatttccacataagccgggaagcattatcttcatattctgagctgccatcttccatgagagaagttataagctgactttgtagaataggatccactagagtcggccctccaagtgagatgatccattctagaaaggtgaagttgcacccccatcgatctcatccatgaaagctgccaccatt

SEQ ID NO: 4746 - DNA, 1341 bp, Glycine max
tgcaggataaagattaaagttattttatcaaacgcaactatggagacaagtttgtagtactttaccaataccctacttattgctatcactaatgccaacctagttgcaaataaagcttataaataatattcaaattcaaaactcccagaaggaagccacaggactagttggatttgaatgcaaaattttcatgtaagatgtatagtcagtcagttttgcataaagaagcaaaaaaaaaaaaaaaaatcagagaagggaaattggggaaaaaagaaacaaatatggtaaagttaaaccttcaaagtatagcccagattctgatcgttgtgaaataaatattaacttcttgccctaattctgattcaattacaatattaatagcacaagctttatcgaagcataattcagagctcagacctcaaattatcaataccaaaaccaaaatccagagcaacgatcgtttaattaacttccatcaataaataagagcaaacagaagacccaatcaacaactgatccacacagagcaggtcatgaaacaccagatccagcaatgaagaaagacatgcaatgaatacccacaatcaataattcagaattgttccccctaaacatgcaaacgaaaaaatctattcaacccacaccgcgaagaaacccgcatttgaaattccaaattaaaatatctgagtgaatgattcggataacaattcacgcacttaggttcagaatagttcaaaatataagacacctacaacaagcaggggcttcagagcaattaaatttgatcagaaatagacatgtgaggaaataataataataataatgaaacagaaaatagaaaaactgaccgacacaaaaacacattggtttgaagaatcacaacaaaaaatggaaatagacgacattagcaaccaaaaattggaacgaagaaattgataatccgcagtgtcgtttagaagggtagagaaataaaatgaaaattaccagccaatgccatccgcctagtccaacggctttcttaacgacaccttgaagaccaacgagcaccgatttggtgcggttatttccggttacgacaactttggtgtgacgaggaagcaccgataactcttcttcgctactatctccacagctctgcaaatgggagaagccaccattgaccgaactttccattgcctctagcattttccaattcacccgctcaaacactgatactccgatgtcaaatatcgaaattgcattcgtattgaagatcgtgcattgctgatgaagaatgtgcgagtttcaggagcagaggagatagggtagtggagaaatttgggaaattctgcaggcatgcaa

SEQ ID NO: 4747 - DNA, 1328 bp, Glycine max
  misc_feature (46)..(46): n is a, c, g, or t
taccattcggactcgtacccggggcacctctaaatcgacctgcagnaatcttctccctaaatgcacgcattttcctcatagtaggtggagcatcttttctttcagcaaaaccatctcttttctgtaaattgtcatccagtttcacctgtgatttctcatctttttgctctgtactttgactttcattattctctttactctgagtaaagacttttcctgcatgaaatggaagaattgtgtgctttagcgtagagtcaatctacaaatcatccatgcacaataaagccaaaggaaaagaatatatatatatatatataggaagcttaccaccagcttccctttgaccactgcttcgaccaacctgcccagtactaccccgttcatcatgctgttatacaacaagcataggcaagcctaagagggttatatatcgtgccacttcaaggcatgggactgaacaagaatccactacatcagcccagaaaaatagtttgcatatactgaataacaatcaagcatataaaagggattttaaatctataattcaaaatgaatctccatgtcatcttgaaagtgataatttggacatttccttttcgatatagcataaaaaaaaaagataagggatgataaatattgcaacttcttatcaatgaagtgtggtaagaataagaactattttcaacaaccccagcaaagcaaaggatttgatattatacagattgcacaatcaactatgcaagtataaactattcatacaatatttaaccctcgaagcagatgacggatgttttcttttgataacatttctaatagtttttatacaattgaatttgcattacaagtttgtacctgacagctaatggcataaaacaaagagtaaagattggcttatcatgtttttctcccagccccccctcccttccaaaaacaacataaccattgtaaatagtttagtagccacaagataactggttgtatgcaattgcaatccagggccatacaatgactgtgaactcaagttccctacttaatcttggggaatgagttagctagtgggaggtgtataatgcacatgcaaccctcctctctaagaatgtacaaattatgaatcttaaaaggttaaactatattcacttggttcttatagttgccccgttttaagttttagttcctataggagaaaactgcaaattttagtccttacacatgcatataagataagttttggtaccaatcgttaaccttagagaaaactttttggtgcttaaaaaaactgaatagggactaaaacttccaattttctgagagactaaaacttaaaatga

SEQ ID NO: 4748 - DNA, 798 bp, Glycine max
agtggtccttcaggtggagtgacatcaaaggatatgggaatcaattatctggcactacatgatttgtttcaaatgtctaatgaaaggaaggacatcataagctatgatatttatgtccaaatggttgagatttacaatgaacaagttagagacttacttgcagaggacaaaacagacaacaaatatccttttcatagggtcaaacattttcacactactcataagagattaggaagagaaagttttatttctagtctgttgatcttaatatttgcaaataatttatctccttaactaacctcaaattagaaatccggagctgcaatgatgacgggttgagccttcctgatgctagattgcatttggtgaagtctccaactgatgttctgaccctcatgaaacttggtgaggttaatcgtgccgtcagttcgacttcaatgaacaataggagtagtcgatctcacaggtgaaattctgcttttcaggagttctgctaactgaattttcttatataaagtagttgggtttattttaggcactgatagggctgctcaatgtgtctcagtgtacttactgtgcatgttaatggtaaagatacatctgggagctccattcgcagctgcttgcacttagtagacctacctgggaagtgaacgagttgacaagttctgaagttacagggggaaagactaaaggaagcacaatttattaacaagtctctttcctggttggaagatgtgatcacagccctggctcaaaagaattctcacatcccttataggaacagcaaacttacac

SEQ ID NO: 4749 - DNA, 1430 bp, Glycine max
acacacatcactatatctacccaatgcagagacaacttcaggtacaggactttataggctatagtcacaatttctctctgtgccaagaaaatgcttaggtgttgaaggcaacataagtcagatactgagacttataacttgagtaattcattccctatgtattaagttatgataagatatgtccctgtctggagtattactacctcaacagcaaagcgtgcccagattttgtcattgtgagcttccattaccccctttaagatggttaagcctaatcctctgattaagtcggctatttccaaaaagcaacctcgttcctcacaaagcatctgtcagaataaccaaacaaacagattatacaggtgataaagcagataaagcaatatatgaggaccaaaagaactttaaaaaccatccactacctccactagcatctgacgaggtggaatcagatcctcgactacaatggggcaaaccattgatagtgagccaacttcatatgcccacgtagccccaccctcaaagttgtctttcaaaagcagcccaccttccttattaataatctgcatatttaatgaagggatcattttttttcattataaataattcctcaaataaaaaaattatctactacaatttcttctttatagtccctcatagtataaatgatgaagaacaattttttattgtaaaaagggtttagttgatatttgatttgagctaccaaataaataggcaagaaaacttttcaatgttaacaaatatatgttttctctatttattgttccccacgaaaataaaatattaccatatatacaagatcaactgcctaaggtagaagccgtgggagtgaatactgtcccataccttagactcccctgtttgtttcagcttgtcagcatgctttgtcacactttgtaagaaaagcatgtgcttaatggtccgttccaaaagtgcatctatgctacactattaagtcataaaaagagatcaaagaaaaaaaaacaactcagtgactgaacaagatatttaaattaccaaaaaataagggatgaaataataagcaaggaaatacttttgctccgtttggcacaatttctcgtaactctttcactcgatcttgaatcatttgacgatctttcggtcgaggccggggattctctcctggtttaagcctcttacgatttggtttgcaactctcatctgcctgctttgagtatccagttgaaacaatattctcatgtttcacactcccactattctcaacccatgaactaagttgagagccataaacagaactagtttgagaacagtttccagcatcatccttgttacatccggacctaagcaaactagtttctatggcacctgttttaccccaattcttaggaaaatcaaacaatcccccctggaaatgacccgacattacc

SEQ ID NO: 4750 - DNA, 802 bp, Glycine max
aacaagtttagcatccaggaattgttaaggtaataaagttctgcatataacatcaagacaatcacaacacctcaaaaagacattagtatcactgataattttaactctcacgagaagagttcctgtagccaactcccagtagaagattagaaaattattttatgaatgagaaatgtatgtggcaacataataaccaatcattaccagtcaacaatttcgtttattatcatttttttaattcttataccatcccatggtagtaaaattaggggcacaacagtaataaccaagaacacatgaaagttcaaaaaagaaagaagaaaattaaagttcatgcacataactgtcaagtcaactggatcttgtgaattctagagaaaacaaaaaaaaaggaactaaaaatgaaaaagaagcacggattttgcaaatcttgatctacaaagttccaagtttggcaactgccactaaccaaacactgtaaactcagatgccttctcaaagaactcagtgaaacaaaacaaaaaaaaaagcagaacaagaactcatgtccaagcagaaattgtagcttgattgtagaaaggtacaagcacaagcagaaacaggcaaaacaaaacttaagcagtggatcagctgaccaaataagacatcatttctatgaaacccttcattgcactttccattggaaagtttaggcagaaaaggcatttgaccatgaaatgaaaccttggcattccacataaaagaagccctgatacacccatcaccttcagtttctgggagcatgtccattatgcacattata

SEQ ID NO: 4751 - DNA, 1266 bp, Glycine max
cctagtcaaataagttcggcagtgctcgggccacgagaaaaggtgtatgttcttccaaccatttttcctgcaatcatgccacaggtttttttctgacaacaacttgatcaatgcatcagtaattgctttctgatcatgaggatccacaagcaaaccattgttcagggcctaacatatcaaaaggaggcattggtcagtgatcgcaaggtttggagtctacaacaacctttgggacaagaatttgttgcattcaaatgtgaattttatgttttccagttctatctgagaaaataatagtgcacactgaaacatgtaggatggaccatgtaactaatataaattcattttacccgatgaatgtccactggtcccccatttttagttgccaccattggaagcccatgtgctgctgcctgcatgagtttttacatgtttagacataaaaaagggatcattgtaagttgtaacattaaaataaaaacttatgaccaaagtagctagttagttaaatcctacctcaattaaagtaagaccaaaaggttccactaaagcaggattgatgaaaacaccctgagagaaaatttaaaataattagctgttcataattgttaaaatgtaagttatttctatatataaagtaaactactaaacttcattatacctttgtttttgcagcatatcggtatatctccggaacatcagattgcttgtgatgtttagggtatgccacttgcccatataggtcatacttatcaatcattttcaacactgttgtgagcacactggcattcccagaagacatctcatctatgtcatccctatttcccattatgagagtctgtttgaaaacacattagtcttctccaagcacttaacaatagtttctactgagaggacagctgaattaagtcaacttacaagattagcaagttctcttaaggggcggctttctccaaaggcttttaacagagtggttaagttcttctttggatctggccttgataaggccaagatcactggcttgtgaggatttctaaagaaacgcattacctgcactgaattgtaagtacaaagccggcaataataattaatgagtcatatttgtagacagattggattatcatttgctcacgtctaaccaaattgaaggcattgcttttggtgaaaatccttcaacactagcagtaagctgagcaagctctccatcaatttcagggccatcttcttgacgcacaacattgctaaagtccataccaggagggataa

SEQ ID NO: 4752 - DNA, 1539 bp, Glycine max
aattatatctcttagtgtgagcaaccctgtaacttgctcattatcattgatcagaaagctgaaactgctattagtctcagtcgtatgctccattatttgcttgagcgtttcagtttccttgttggcaacgggcaagtccattctgggtatgaagctgtttttcagacggagacttcctgctgtgagtaaagccccatggtcatgttcaatggcttgttcagttactactttgtcagtctctatgtgaatgaattctttcacagttaaaatcctgctatggcatagaaacaagcaattttgtcatattggttacatcaatactgttgcctacattggcccgttagcttattttctaaaggcgaaaggcaaagagaggacatgttttgaacttacgatctatttcttaggaggtcattattctttacaagattataaacgtcgccgttccttacattacccacgagcttcttagtttgtcgatctacaacagcaactgcacaagtttggttttgccagagcaaatctaaagcatttgcaacagtttggtccccatatacacaactaggattttcttggctttcaaatctgtggaaggataagaaaaggggtgaaaaagcaacacacaagattgccaattcactttgaataagtggcagatggatgtatcatgtatgcacaataagaagtgtgagagttgaataccggaaatctgatatgttcttatctgcaatgctatcaaaccactctagttcacttgattgaagaaggtgctggactactgcattctagcagaaagactaagcatattaaaccaagatacatttgtttcaattcattgttcaaaacctgtgcttaactcagcagatacctgtgtaacataaccgatgagtccagcttgaggttcctgtatgaccggcaaaacgtgcacccgatgcttagagagaagtagcaaagcatgcaaaaccgtgtcatccatgtttactgggaaaaatggttcccagaggaatgacttggccaactcgctaacctggtaatattgtagtagtaactcaaaattagcaatgtgttcaactggacagttttgcatcagcatgctttataatgagactcattcctaatatcctacatcaatgcaaaattcaaacacaaatttttgttatggtttgctaggaattatgactaagtaaagaaaggtcacaaaaagaaaatacgagaaaccttggttagcccaatctgaggaacctgatccaggatggagaaaaggccatcgttctctaaatccatgagatgattttccatggtatcattttttatcttatcaaattccttgaaaataccacgtaaaaaatgagaatgccgtgccatatttgggtggggggaagaatagataaatagaaggtgtctaagtgtaacttagtgggggtaatacctcaaggcaccaaagaaccatgcttgtaaaatcaatgagaccaatataacgatctgaaaaccttatgctgcccgcatgggagtctgacgtatccacaattgctgcaggca

SEQ ID NO: 4753 - DNA, 717 bp, Glycine max
aacaagaggcagaacatatctggactaaggccaaacaattaggggtttcaggagtggaggagcaggagatgatcattgagaaaattaagatcatggaagaaagggacaagttagaagcggaaaggcggggagacagaacaaggacccaatgaatatagtctcatacaatgttaggggtctggggaggggggtaaaatgggcagctattagaagattgagaaacatggagcaggcggatatgatttgtcttcaagaaacaaaaaaagaaacaattgacaaagctatgtgtcaggcgttgtggggagatgtagaggttacttgggcaatgcagccagcaaataatacagcagggggtattctctgcatgtggactgaaaactctttcaagcttcacaggaaagtcattggaaatggttttgttttcctgatgggggaatgggtcaaagaagcacagcagattaatataatttccatctactcaccatgtgacattcacaataagagaattctatgggagtccataaagcagctgaaaggtgcaatggtagggggacttttgtgtctcctgggtgactttaattctatcagggaccatgacgaacgatttggtaattgccaaaggctatccacagacagcagtatgaaagaatttaatgattggatagatgatttggaggttcttgagccacatggatgggtagaaagttcacttggtac

SEQ ID NO: 4754 - DNA, 981 bp, Glycine max
  misc_feature (875)..(875): n is a, c, g, or t
aaaaaaaacacaaacacagacacacccaaataatcagcgatccacttctcccttgacctcgaccaagatcctcttcaggctctgcctctttgacgtcaaccgccacatcaccaatgtcggtgtcatcgaggtcaaacccaagatcgacagcataccatcaccaccgccacacttaagcggaatcatcaacacctacatatctatgaggtagccatcggaacggaggaaatcattcaattttgtttcaatcaaccccattatggtgttgttggcattagtgtggtttgccgccggcgagggaggtggagagaaacagactaggtcttctgaaggagaggagagatcatcaaaggggtttccacaggaataaattggaaaaaaagaaaaataaaaaaaatcatcactcatagattttaagtctaataatatccaatgctctataaaactttcttatcatgcaaaaagtatttcacttttgcacggtaaaactcatcttgatcactttgataactgaatccaaactgtaaaatctggatcattagtgaggtttaaattgaaaaactataaatttgatcaattcggcttgaatatcagattttgatttatgattatcttatttatttatatatttatattaaaaatgataatgataatatctttgtaaatttagttctattttgagcttttcgttgtcgtgacttacggattgatttgataatttaatttaatagtgatttaagaacaatttcctattattaattttcttttatcgatttattttcaaaaaaatattttaataatataaatccaattactcgatgtgaattgatgataggtgagtttggattggagacctaaacaagaaaaaaatgcanatcaatacaaagagattaaaaatgcaaaccaatccgttctcacccttgaataatattttttagataagggttctttttagaacattagataatgttatccatacac

SEQ ID NO: 4755 - DNA, 803 bp, Glycine max
tgcagtgcttgctgggggtgtggatatgagtgcaaggattcctgaaaggtgtggctccatggataagcactttggtggcacatttgagacacctgctggtaggtacaacggctatgtggggtctcccggtatggctgatgacttggatgacggttttggaggtggaaagaggaagggttctgggattagaatgtttggtgatttatggaaaaagaagagccaaaagtgatgtctggcttatatattcagtgagtaaattagtagtactttaactaaggtcatgttttgatggtagcagaaactgcaaaagcagttgcttactgttttgcatctttctggtatctttagtcatttctggtattattaaggccattaagcgtgtagtgttactgttgcatgatctgtgcaaggtagtgaactttttgaaagatggattatatatttcacttctcctgaagctgcgatgagcacttttacttgtttttaggcatattctccggttttgcactacttggagttaatgtcttaaagaacatgcttcattttctgttaactttggtatgactctaaaataacgttaatatctaaaatgttatattgtttgccagtgagcaacttcgtatgtggaacctcattatcaatggctgaggaaggtaatatgttgattagatagatagatactggaaacaaatgcatgatccaaatattgaagaagtagcttaccttgaataaagttagaccaagcttccatatatgcctatgcttgcgctctattgcaccattttgatggtgagtatgagggc

SEQ ID NO: 4756 - DNA, 837 bp, Glycine max
  misc_feature (799)..(799): n is a, c, g, or t
accaaacacgccgtgaatactaaatagctcggatcattgtgaaacatggatggtgttgtctgtgattaattaatgttatgcttgatttatgttgtgtttatacggatatttatttatttataggatgaaatacatacagctgaaaagagactctttgatgtttacaaatgaaaagattatttttgtaaaaagtaaacacacctttaaatataatatttgttcatgaaatttaggaagacaatagataatcgaatgtcgactattgaatttcaatgttaaccacgaaataacagcaagcaaccaacaacaaataaaactcaattgacttgaagtttcctcgatctccattggggaaccctgatcaagttttgcatccctcccctctcaattatcccttcaggcttcggcctctcttccatctccttccctctgtgttcaagctgccaccaacacatgcatgcatgttggcccttgttagttaaagatgcttaattaaggactaaaaattatttttcaaaactatctgttgaaaaaccatctgatccgttcatttcttagggagttgtatatatcattaatggatacaattgatcatggaagcaaaatatttggtcatcctctgctccaatatatatatatatatatatatatatatatatatatatatatatatatatatatcatataagtttttaaaaaaattggtaattagttaattgagtccctaaaaaaacatcattttttagtgttttaaagattttttttactaaattaattcaataaagatttggcacatcgntaaaattagttctttaatatttaattctcatattatat

SEQ ID NO: 4757 - DNA, 880 bp, Glycine max
  misc_feature (745)..(745): n is a, c, g, or t
  misc_feature (753)..(759): n is a, c, g, or t
gtgcgttgatgtcgaagaacaaacttcaacaaccttgcagtggcatttttttttttttttttttgctgaattcaaccttccattggttaactggtgtgtgacaatgtctaatatagtttggttatagtagatgtgtttctagaagactagaacatagcaattagcaaggggataacaaacaatcattgacagattggtagcactataacgacttttatattaaatgagatgattttgtaaaattatatatcaaatcatttatattagttgtaattctaatcgatttaaaaaaaaactttttatacagattttatatcaattatgattataattgataaaaaaatcatttattttaattacaacggatattaaaaattaaaatcactaatattttttaattaattaataatttccaatttagtatataactatctagttttgtaaaaacaaagttgaattataactctttgcattttttttcttgttgaagattctttttttcccttcacacctcgtgcaacactagaaaccacatactacaatatagtatataatatgagaattaaatattaaagaactaatttaacgatgtgccaaatctttattgaattaatttagtaaaaaaaatctttaaaacactaaaaaatgatgatttttttagggactcaattaactaattaccaatttttttaaaaacttatatgatatatatatatatatatatatatatatatatatatatatntatattannnnnnngggggggcgccaaggggaggcccaaattttttgggttccataaaacacttgtttcccattgaaggattatcccacctcccctaaaaatgaacgggttaagttgtgtttttaaccactattt

SEQ ID NO: 4758 - DNA, 712 bp, Glycine max
cttctacccgttgagcctatagagccgacctgcagtgcaacaaaaatgaagtttatgcaaaactgacaaattcgaatgaacagaatcaacacacaacttaaaatgaggaaaagtgtcaataagattgataggcagattttttgccattatttgtgcagatttattggccctttaaattagcataacttgtatgattgtaactgtgtaattatatccttacttacttagcccagctgtaggttaccatatatcgttttttagcaaacttcaaggctagaaatcaaattgtatcatattatttaaatgagaattctccaaaggagaagacacagttttcattctaatttcttcgagtttaacatggtatcggtctaggttttgatcccaacctagttttttttcttcgctgcgctcccagtcttcgagttcccagttcactgttcacatcaaggtactgttcatacagtgctgttcacccggtgctgttcttgatttctcgagtttcttgttttttctcctcctgtgatttttttttctcagcatcatgtctactgaaaaatataatgtcctctttgttcgtcttaatggaaataactattccacctgggcattctagttccagatctttgtcaaaggtaaggagctttgggctcatgttgacggaactgattatgctcttgacaaaactacgcataaggagacacgtgtcaaa

SEQ ID NO: 4759 - DNA, 811 bp, Glycine max
tgacaaaccaatgccaggttgaggatgtctcggtaattaagatatgcagttatggtcaatcttttcaagcttgcataattgggactatcaccagtaatcaccacatgaacaaatcccatctttaaagtgatgaaaacggtttgaatccctcacaataatctccctctcagtaattttggatatgtacttagttgcattatggcaatcaccacaaacccgcaagtttttaaatatcctgatgggactttttggtggggtactgataattccaaatacaatggccagtctctcactatgacttgtcaaaatctcctctttctcatcctcctcaacatcttgtaggacaaaactatagtctggaacataaccaaggctcttcattttggcattcaaaacccttaattcctcgtatatctctgcacattgtggatgggattggttcccagcataaaagacttcaactacactacctactacaacagagctccatccaggagtcttcctcaatcccctatctctggccaatgatcgtactttaactgctccttcccattttccaacattagcatagatatttgacagcaaaacataatagccaacattctctgaatcaactttccagtagcgatcagaagccaaagtacccaattctgcatttccatgtattctacaagcagcagaaagagtgccccaaattgatgcatctgccctgtataggccatattgcttactaaattatatgcctttcttcaaatacccagttctgccaaacaattccacatgcagccataatgcttcaaattaggcttga

SEQ ID NO: 4760 - DNA, 761 bp, Glycine max
gcctgcaggcgtactccgatccttttttggttcattggtcaatttacactagatgcttaaattgtatcaagctaactcaaagttttagttttagaattactcacatatatagagaaggcaacgcttgtgctgacaagcttgctgttttaggttctcaaggtttggggtatacttggtggcattctccaccttcttttgtcttaaggagttctttaggtacaggcaagggcttcctttctacagatttctgtaaaaggctttccttgagtatggtctgaccctcccaagtgtcttattatccttccttttactatcaatatatatttgagctgggtccttctggggaggtaggggttgggatgccaacatagttgggatgtcaggcccttgctcctttttgctaaaaaaaaaaaccttccattcaccagaaaacgttacagggatgcatccttaacatttatggatcctgagacaatcaagacaaaaaaaaaatgatcatcatgaaaagtaaaaaattaaaagataacaaaaaaaaaaaaaaagcaaagcaaaataaattagttatagttgagaaagattgggacattttattcatatagaatgatcactaaaaagcaagtgcaggccttgcttgtcatgtgtatgtacaagttggactagagcatcacatcattagtggctttgacaagactaaggttctgctgagaatgcactaacatttcattaaggatgcccagtttttaaagtactgcatttacact

SEQ ID NO: 4761 - DNA, 1360 bp, Glycine max
cagcttgcatgcctgcagaacagaatagcatatagaagcataagaaaacacttctgcaatccttcaaccatcatgtagtttcacaaattggattgctagtttgaaacttgaagcatactgcatataatacagagcaaaacttagatattataccataaaactggtattactattctctaattaaaattggtcataaaatatattggccgctaacatagcatcaattttaattacaaagatgaaatacaactcttagctaattttgacatgaaaatatttccaataatatatggatcatattgctccgctccgcatgggcaaaaacattgcagcaagtgtatttagttttgccacaatggttgatgcgttcaaatttaattattagagggacaacttccctaagcaaaactaaaataggaaaagaagagcataacaaaacctttggcaagttattaaagaaggatcgggtggtattccagtggcctctccaaaggcggcgaattggtgtccatagaaggcacccaaagatggtatggcggtggcccacactgctaggtttttcaagtgctcaaatctcaatttggacttggtgtttgaggctgccttggtttgtatttttccggtggcttcttccctcaatgatattggagtgtgagacacagactctaattttttggcccctcctttcttgcccatgagcttcgtttatggggaatttcgtcaaacacctgctatgcacatactctacacacaaattataacataccataatatagaaggttccaacgtggataacagaaagcatcaatttaaactaataatataacatcacttttgagactagatcttccataaagagttgaagatcatatactcaaatagactaataattgagacagtcacacaatcaactcaatcactgctaaacgtgtaacatacaggcactatctgatggataaacatcatacaaaagtacaactaccagacagtaattaaattcgtcccaacaaaaggttctgccaatgaaatcaaaatcgtaaccaaatcaatgaaaaaaacaattgaaacaacaaacccctgagaaaagaaatacacagatgagagaggaaccgggtatcaacaagcaaaagagaatgagctctgaaccaagagacagcatgaaactacatgaactgaagcctgttgatatggattctatagcgagagtagaaactgacttgaagggaagccaacagatttggatagaactaaattagtaagagttaagttagaagacagttaataacaaaaatcatccacgtagaggaataagatcgtgaaactgaggtcacaaacaaaccacaagcataatactgatttt

SEQ ID NO: 4762 - DNA, 1240 bp, Glycine max
aacatcgccctcttgtcatttgtttcataattatttactcctttacttaattatgtgtctcctcatcattgtggttcagcgaccagaatctgtgaagattgatgcacgtgatatcaatggaacaaggttttcagtcaacttgtctgaccttcctgcacgaatatttcagcatgaatttgaccatctacaagtatgtttttcgacttggataactaaagcaactagtattttagtctgtgcataatacagaataaacatttatatctatatattaaaattcataataaataaacattttatgaatatattgtaattaaaattcataagaaataaatatttttttatacaaattatattttagatttttaaaattttttacaaggttatttttaactattgacaatttttttttataaaaaagcaagattaaaattcaatttagagatagagataaaagatggtagattgaaagagaggcaatttttttttggaaggcaaaagtatagtattattaatatagaaacataacagtaccagaagtactgagtataacaaatacaaggcactcaaggtgccaccttccaaaacaaaacccaacaaaaaacccaccacgaaaggagatattacaacttaaccaaaggactccggaagtttggtagaccaatggttaaatggaatattgaaacctttctctctagctttaagccaagaccaagcatgaaataaagcatcaaccatcactttgggaggttcaaatggggtgcccttaaacaggagggaattcctatgctgccaaatagtaatagttagagcaatccaccatacacaccacctactgtgattcctctgtgccccaaaaccatcacagaattgaataaaatgtctagctgggtcatctgaaaaagctcctgtaatccgggtccaactcatggattcccaccacagccctatagtcattctgcaatgaaaaaagagatggccagcctcctcctggtgattttcacaaagaggacacatagtatcctgtagagccatatttctcctgagcaaattagccctggtagggagtctatccctaaacaacctccatgagaacatctcagccctggggagattttaagcttccttagaatctggaaattcctactgtgctgaccagggctattggtaggtatcaagagcctatatgctgacttggtagaataaatcccagtagggtcagctttccacactatagtat

SEQ ID NO: 4763 - DNA, 844 bp, Glycine max
  misc_feature (789)..(789): n is a, c, g, or t
ctttcatgcctgcagttgatgtatttggatatttttttatttgggatcaagcaaggttttaaattacgattgccgtcacagtttcatcgtgttacttggtattgccgaaaattgtagaaaagtgcagctggaattgtggtcacgatgcagtcgtcaagagccacggttttgccgcaatccatgatattgtggaaaatggcaattgtagataaatgcagccacagttgcagtcgcaacagagagcccaaacaatttaacgttggggctgaaagcatggtcgcagaccgctttttaaaaccttgggggtgaagagatttcttatgtcatgtatgcttgggatctgtgtgattcaatccaaggcatgtattgggagcagaaatgggtgctttgaaagtacataagttgaaccaatgatgcacatgaatgtcatgttttctaactgtttacaagtagtattcgaattcaaaatacaacctgtactgagtctttgtgattttagtaacgtgagaggatggacacataacatagcagaacacatctgagttgattgtcctagttcttgaagtgttcaatttttttacttttttactctgaagtctgaaatcacattgttacgaattaaaagttatgacaaaccatggctcatgttggtctgaagatactgctcgtgtgcaggtcaatctcatgatctcaaaaaagaagattgcaaggaaacaagaatcactggttgtttgctttggggaaatgttaatagactctgttccaacgagaggaagggagtgtcactgngctgaagcacccgctttcaagaaagctcctgggtggtgcacctgccatgttggct

SEQ ID NO: 4764 - DNA, 1308 bp, Glycine max
cgggggtcctctacatcgacctgcagaattaaggtataaaattttagaaactatgaaatgaatgttgtgcaatatttccagttgaatgaatatggtgaaagattttctcttggacagcatatataaaacacaaattcagtttagaatagcacttcggaggcttaacaacaactatgctctcgactttgcagttgatagatacacatgcaacatttgttaatgcaaataccattcaactacctgtgtatatgatcatacttgatactacagagaaattattttttttggataggcaataatggttgttatgactgccattaagagtatattgttgtcactgctattttttgtttgttcgttatttttatgcaattcaggtgggaatgtaacttaccaaatagtttggtaatcttggaactgggcgtggcacatccgtgcttgaaatggttgctgcctttgaaaaagcttccggcaaggtcatatcatattatttttcatcttcctctcctcgctcacatgaatcatccactcaacctgatttcttaattttccagaaatttccattaaaaatgtgtcccagaagacccggggatgctactgctgtatatgcatctacggacaaggctgagaaagaacttggttggaaggtacgtacccaccatcgctttctttatttttacttgctcctctcaatttcatgatcattatcattttttatctctggcgatattataaacctacttactaactcatgcacaacaaaattaaagattagctttataattgtatggtttactctgcataattatgagaagccaacttatgaattggtaattaaaaggatgaggtctataaaacagacgaccaacctactatgctgcattgtcgataaacagtttagagttattattattatcgtcttttttaatggtgcagggcaaaatacggtatagaggaaatgtgcagggatttgtggaattggacaagcaaaaatccatggggataccaggggaagcattaaatgaaatttggtgctcgatcggttgtacttggaggaggtcttcctccaccatatcatatcatctccactccagatataatatgttgatgtttcttttgttgatacaattgattgattgattgattctttacactacgtatattgttggcctaaataattgtctaattatgaattttcatattgtagaaaggaccactttgatgagtcatatatgagaattaatttaaatgatttcccacgaaacaacgaccaatttctcttcataattatttgttggctgcaggcat

SEQ ID NO: 4765 - DNA, 681 bp, Glycine max
gcctgcagacgacatccattcctgccatttcctcaatagctgtcatacgtttcgtaatagcgccttgctgcgaaagcctgtgcgaaccaatagccatagtgacagacagaacagttggcatggcaattggaattcctccaatcaagagaaccaacagattgtcaatcccatctctgtacttgcggtgctgtattgggtacatgactatgagctcaatgattattccaaccgcgatggagcaaatgcagaagttaccaattgctgtaagcactttctggaagtgaccaacttggttggtgctatcaaccagatgagcagctttgccaaaaaaggtgtgcactccagtggcaatcaccactgcttctatctcacccttcttaacggttgatccagaaaacacttcttcagagggattctttgtcactggaagagattcaccagtcagagcagactgatcaacactcagagcatcaccctccagaagacgggcatcagcagggatgatatctcccagtttgatgctgattatgtctcccgggaccaaaattgcagcatcttggtccagtccatctcccatctctaagaacccgaattttttggtgcaacaacaaacatttaggctgagtttgatttctgttttaaaaaccagttttattttccaaagcacttaatagggtactc

SEQ ID NO: 4766 - DNA, 1380 bp, Glycine max
ggtgacccgggggatccctctaagatcgacctgcagattgttagtccaacaaagttgaatgcttccgggatggttaataatgaacaagtttacagagggatccttgattgtcttgcaaagacttgtagagagggcggcattaggggtctctatcgtggagtgggtatgactttaaatcaccttatatcttttgtatcgtatatcactcttgcattggtgatgcaacactcttcattttgttcatggcaacagctccaactcttattggaatattcccatatgcgggtttgaaattctacttctgagaggaaatgaagcgccatgtccccgaggagtccaataaaagtatcatggccaaactcacgtgtggatctgtggcagggttattgggtcagaccatcacgtatcctcttgaagtgattaggaggcaaatgcaggtaatttacttcatcttatcatccagataatgatttggtagatatcaaattaactaccatggtacaaagttgacaaccgtctggccaggttaaaaaactcctgccatctgattatgctgaattgaaggggactcttaaatctattgtttcgatttcccaaaagcaaggctggaagcaactgttttcagggctgagaatcaattacataaaggtgataaaaaaataatagcttattaatgtaaccgcccgacactctaaaatcattctgtatagctaagagatgatttttgtaattcaggttgttccatctgtggccatcggctttacagtttatgatactatgaaatcatacctgagagttccatcaagagatgaagctgcggttgaaaattgaaatggtaaccaacaaaggaatcagccagacatcctcgccgtaataatataaaatgatcccctttccatttcagcctgctaacaaccccatagacttcaaactggcttcttcatctctgccaatttgactgttattcatacataattgtagctgcacactgcattctttcaagttgtacggcgagatggagcttatattccatctccaaataggatacaacatatacatctgtacaccttaccaaggaatgacccctttgattcaggtctcattcatttcatcatttgaagaaacatcgcgtatgttgtttagttaggacaaatcatgtacttataaataaaagattaattgacccttttggatgtgtaagtagagaatcatttagaaatgttgatatctaatatctcttcactgcatttggtttattctaagcactcaccagatttctattaccttccaattttcgtgggctattgttgttcttaatttaatacccaatgataaataagatatctacaaattacttcggacagaaaatgtcttgcatat

SEQ ID NO: 4767 - DNA, 1362 bp, Glycine max
ctcgcccgtggtatgctctagagccgacctgcaggtttttatttctattgctttgattcttggtgatgggctttacaattttgtcaaagtcctctatttcactgccacgaatattcatgccaccgtgaaaaggaagaaccccgaaacatgtaagtataaatggcctcataacttttccagctcacggggatgtcagtcaaatcctccacatactctcaagtcttaccaatctcagctttctttttcccatgtaataaaaattgctatcaatgtctcaacagaccaccaacaaaagaagaaaaagaaacaaaatcaacagcacataactaaatgaataaatttacacttgttctgtgtcaatgcatgtaatatagcctttcagatttggtataaagctgcatttggtatttagcaaactagaaatgttctaatatagagtggtttatgatatcagtgatcttgcatttgtcagtaaaatctaattttattttgttactgtagtttcagataaccagaaaccactccctcttgatgatcttagacggaatgaagtgtttgcaagagaaagcattcctatatggttggcatgtactggatacatattattctccatcggttctatcattgtaatccctttgatgttcccacagttgaagtggtattacgtggtgtttgcctatcttttcgcaccctctcttggcttctgcaatgcttatggtgcaggtttaaccgacatgaacatggcctataactatgggaaagtggctctctttgtgctttcagccttggccggaaaaaatgatggtgtagttgctggacttgtggggtgtggcctgataaaatccattgtttcaatttcatctgatttgatgcatgatttcaagactggccatctcactttcacttcccctcgttcgatgcttctaagccaagcaattgggacagcaataggttgtgtagttgctcctctcacattcttccttttttacaaggcttttgatgtggggaacccagatggggactacaaggctccgtatgccatcatatatagaaacatggcaattcttggtgtggaaggcttttctgcccttccccatcattgcttgcagctttgttacggatttttcacatttgccatagcggccaacttggtcagagatcttggccccaaaaagattgggaaatggattccacttccaatggcaatggctgtccctttcctagttggtggttactttgccattgacatgtgcatgggtagtttggttgtgtttttgtggcacaaactaaacagaaatgaggctggtttgatggccctgcagtcgatttagaggtccccgggtacgagtccgaatcgtataa

SEQ ID NO: 4768 - DNA, 847 bp, Glycine max
  misc_feature (732)..(732): n is a, c, g, or t
  misc_feature (794)..(794): n is a, c, g, or t
ctctctacccggtgatgcctaagagtccacctgcagtatatgctccaccatatgaggtgcttgatggccgaagactttgcatgttatactgatatcgttgctgatgggcattaagtagcaagctgtgagcatggggaccatctccaagttttttaagggcagaaactgatgcacggagttccgcaccacgtgttgagggctgacaagcagcttcagcaagctgatcagctaacttttgtctacgttcaccaatggaattctgtagagacaaaagtacagatgggttgatagatttcatctcttttgcctcagaaactacacattctccttcatcaagagcagccaaagcttcttccactcgcctttcagccaagagaacatccaagagatcaggaaactctaccaaccatttgtctaggtctgatatctccttatcttcagaatctgatgtggcatttacagaaaaatcatcagaatttgagattgataatgaatcaatgtgaactccttcagccaaaccatgtatcaaggcagcttgtgtagagagcaggtttctaatagatgaaagctccccctctaaatcagatatctccttagatgttctgtaacgtttaaatattgcttagattcaaaatatgaccaacaatatatcagctaactaacattagctaaaacatattgcagcagctattatttaaggtccaaatatagaaagaggtaaaataaaaaaanaagagtaaatcacttcggatctcctattttgcacttcttacacaaaactccctctatttctntaacctacacaaaatcccctcttattttataaatatgttaatttaaacccaca

SEQ ID NO: 4769 - DNA, 1330 bp, Glycine max
gacttgctgacctgcagctatttcctttggcagtgaagcaactgctaccacctataacacccgattaacattttgttcaatgatttgaaagacacaacagcttgtttagataaatttctcaataaatacttataggtaaataaaataaaataacaagatatataaaaataaatgggtttttcccgtaaactaaaatcaacttatagtgcataagttgattttagctggaagaactcaatgcatttattttttcaataagtgcttatgcaggacctaagttttgatgaattaaagcaatccaagctgtgcttaatttatgcctgatagcatatttagtactaaccaaggtgccatcttccatagtctcacgccgctcatagacaatgaattctctattcctgaagagaggcttggagttatcaccaaacctaagacgaattatgctgaggttgtcttcaagatcttttatgtacctggcttccaccagatcagagtcccattgctggcttaatagaataatggaaaaaccaagatcagaatttatgtaatcagtaactaaccattttgtagtttcaaatcaaattgaaccctcgtgatgtaacgtgatgtacaaataggaggaataaaaaagaaagtaaaagacaaggcatcgtgcaaattttttgtcattcctattgatgtcagccacaaactaataaagaagataggattaaggacaatgctagagacaaaagttttcttttcaacatgccggatgggaatctaatcctcttaactctccctatggtttacttttctttccctcttttttccctttcacctcccattagaaaattggtattcacctttgcagcatcaatggcattggccactgtgatgaactgttggggagagacagatctaagaacccaacggctgcgaaacgtgtggagtgagtcagaccttcgttttgatatctccactccattttcaagagttagcaccttccatccatcgttgccatttcctttgtttgtgaccgaagctgccaataactcttgtatgcagctttcactcgcaaactgcacataccttcttagggagtcctcactaattgacctttttaacaaaatcatggggagggttttattaagttctataccaaacaaaattcataataagattgaacgtacaaaactgtctaacaccaagtctcctactaggtcgctctctaaaacaaatacttctcatgagaaatcaaaatgcttaattagtttggttttggtattcaccaggatcggctgcaaggtgcaggactgctgctcattgtggctggaatgagggtatcaat

SEQ ID NO: 4770 - DNA, 1341 bp, Glycine max
tcagctccatcggagctggttcaacagtacttccttgtttctgtcgcgtgacaacgcgtttggctgctgtttcaacagtactttttgatatggtggtcgcccagctgctcctaccactagagtttcatccctattcgtacccatttgctggtcactgccttctacttgccattcattatacagcgaagaacttcggtcgcctattctgctcctgcctttttcggcatgttttccggccactgtcttcaacttgccgcttattttccagttgcctattttgttgctgtcctttttccggcatgtttatcagtgacttttctcgctttgctgtcacttaatcatgatttcacctcttcagtttgaataattgagtttccacacttcatttgaagcttccaaatcttggttttaagaagatcggaacttgcttttgatttacttaagctgatgggtgttacagcgttctcttcctagcaatattccccaatttcaccaagatccctgagttgtcttcaaaatattggtttgaagcttccaaatgtggttcttaagaaggtcggaacttgcttcctttgcttgccataaatttcttaggctggtggttattccagctctatagcaatgtttgtcaatcgaaatggaaatgttctaattgcagcataatacggctgaatatttaaacccatctaaaagcctatttgtacagcaaatctgtgattctttccttaattagaatataacagatgcagtatagggaattaaggtagttttgctaatttacagggctgaaaatcagcttgtatttatttgtaataagcaatattcataggggaatacacagaggggaaaaacactttttaccctacactttttattagtttgacatggtatcaaagctgggtcatgatcccagtctagcctagcctatatgtctttgtccttttgcaattcttatccaagtctgttttcctattccagatcaagttctttcttggttgttcttcagctcattcctagtctgaaattggttccacgtgaccaattttttttcttagcctcatgtcttctgaaaagtatgatgtcttaatggtccacctcaatggcaagaattactcatcctgggcatttcaactcgagatatttgtcaccggtaaagatctgtggggtcatattgatggcagcaaccccactcctaacaaagccacccacaaggaagagcatgccaagtgggtcgttaaggatgctctggtcatggcctggattatcgcctctgactctgttgatcccaccattgttctcaatcttcgacccttcaagactgcatccgagatgtgggcttat

SEQ ID NO: 4771 - DNA, 1432 bp, Glycine max
ttcttcattccaacttcgagcctatggtgacgcctaactgggcctggatgctccggacacaagaaaaatccactactagttggtgtatgtttctaggtgatgctctaatttcttggaaatccaagaaacaagactctgtctctaagtcgtccactgaatcggagtatcgtgacatgtttgttgcttgctctaagataatttggttgcatggcattcttatagaacttggttttacgcaagctcaaccaactccattacatgttgacaacaccagtgccattaaaattgcatcaaatccagtttatcatgaacgcacaaagcacatagaagttgattgtcactcaatccacgaggcccacaaccgcaaagttatcattctacctcatgtctccacttctgtccagcttgcaaacatcttcaccaaatcattaactcgtcaacgccacgatttcctagttgacaaattgatgcttttagattcaccagcatcaatttgaggggggctgtcaatggaaatggaaatgttctaattgcagcataatacagctggatatttaaagccatttaaaagcctatttgtaattgcaaatctgagattctttccttaattagaatataacagctgcaatatagggatttacccgtagttttgctaatttacagggcagaaaatcagcttgtatttatttgtaataagcaatattcataggggaatacacagagggggaaaaacagtttttaccctacactttttattagtttgacatggtatcaaagctgggtcatgatcccagtctagcctagcctatatgtctttgtccttttgcaattcttatcctagtttggtgtcctagttcagatcaagttctttcttggttgttcttcagctcattcctagtttgaaattggttctacatgaccaattttttttattagcctcatgtcttcttaaaagtatgacgtctttatggtccaccttaatggcaagaattactcatcctgagcatttcaactcaagatatttgtcaccggtaaggatctgtggggtcatattgatggaagcaaccccactcctaacgaagccacccacaaggaagagcatgtcaagtggggtcatattgttcttgctcttgctacctctcaatcttggccactataccaattagatgtcaaaaatgcattcctccatggtgacctcaaggaggaattttacattaaacttcccattggtatgataactcccttatctaatgatgtttgcaaactcaaacgctctttatatggcttgaagcaaacacctagagtatgatttgagaagtttcgatccactctttttggtttttcattcactcaaagctagtatgaccattctctttttctacaaagaacttctaaaggcataatgattctttttgtttatgtggacgacatt

SEQ ID NO: 4772 - DNA, 866 bp, Glycine max
  misc_feature (832)..(832): n is a, c, g, or t
  misc_feature (840)..(840): n is a, c, g, or t
ttcggactcggtaccgggcatctctaaatcgacctgcagtctgccaataaaggtgcttaaacagtaactcgtcacattaaataatccatttaaacatttgcaatgtatttagtggtcagcggtacagggaaaatgtccaacataaaaaaaaaaatgaatggcatgttcagtagtttgccattacttgtaacagatcaacagtgactctcctaacaccattcctcaattataacaataataacaacagccgtatctcactaggtgaggttgacaacatggattgttgaacattatttggctcagttaaagaccaaattttcaaaaaaaattcaaaaatattattcttcatgagatccctcttaacaattttctttaatgtccttcttcatttccctctacccatttttgcaagactaaaataatcctcaactataacaatgcataattttattaaaagaaaaacaaacaaacaaattagttaacaatttaaatacttcaaacaggacaggaaagcacccaagaaattcataaatgctcaaagttgttaagtttatgaaggcaaaaagatttcaaaaagtttccaggagaattaaaaatacaatttgaagattaaaggcagttaaggctacctacaaacagataagagtatgatagaaaataccatcgattcaactacatcaatccaccacctcaataatagaaattcacttacgtcacaaccaaaatttcccttgaagagagacttttaaatgataattgcagtagtaccttgttagtaactaacctgtgaactaagctgctgctctatattttgaaccgatgaactgctggnatgtgatnctcttgcacctcagtaataatagctg

SEQ ID NO: 4773 - DNA, 890 bp, Glycine max
  misc_feature (758)..(758): n is a, c, g, or t
  misc_feature (764)..(764): n is a, c, g, or t
  misc_feature (835)..(835): n is a, c, g, or t
tctagtgcatgaagaatttggtgtgtttggatgttgtaatttttttatataaaatttaaacttagtacctgcggtgtgtaggtcatagaatttgatgtttattttcttgcactcagttattatcttctactcattttagcatactgcctttatgaactagatatcgagtatcaaaatctaaacggcatctggaaaacatgtctcaataccatggtgatgaaatggagtatgcggcagatgataatgaaatggcagaggtagaagaggatatgtatttccgtggcagggcatttggtgaatcagattcggatgatgacgacgactacgaatatgaccctttggtttgttttgactcataagcaaaaccttgtttgctcattttaactgtgaaaccctattcaatgttgtgtgtgtggcctaatgtgtctgtgtgttatcagcacgtgtagttgccgccttctggttttatgggcaactttagtttacatgattaatgttttactataatgtggccattaacatgatatttccattttcttgcacttttcttgggatggctttgggttccctgttgcaggaaaaccgaatatcagataccactgctgctgaagctaggagggggaaggatatccaaggtataccttgggataggttgagcattagtcgtgagaaatatagacaaactagactagagcagtacaaaaattatgaaaacataccacaatcagggggaaatgtcagagaaggtaaatatgttntgcttnggagtttggatgcatttgattagtgattttaaaaatatcgtttcaccctatactttttctacttctcttgnctacaggaatgcaaaagcacagataaagggggggaaatattatgatttctggcaa

SEQ ID NO: 4774 - DNA, 853 bp, Glycine max
  misc_feature (817)..(817): n is a, c, g, or t
tgccaatgccaatatttgaaaataacacatccaaaccaagcaaaatagcgcagacttcacacgatattcaaggtttctaccaaaacaatcattacacaatgcattgcagagacaaatgtaaaaaatatggattaacgattaatttgaatatataacaacattgtacaatacgaagcaacagataatttatgcgccaccatattctcaaaaggctacaaaatgcgttttagaagttgaataaacaggaattgcataaaacagcgaacacaacgcgatgctagttcgagaattgactttgagttcaaaattgactttacataaatttttagtctacaattgattccgagctgaaacaaacaactttaggtaactattgcgttggataaaaaaatataccgagggtggcgatgaatgccttgaaagcataatccccaaccctacctgctattcccatactcacccaactccactaccactagggtttccgcacttccccctctattctattttctgcttatttctataccctaaaatattttttgaaaaaatataataatacaaattcatctcagacagatcacgacgtttaacaatactcaaatataatttgattcttctatttttcttaatttacaattttaattagttttttattttaaaataaatatatttaattatcatatttttaaaaattcataatttttcgtttaattcttaatattacttacgttttatttattttttagtccaattaaagaatatatctaacatatcataaaaaattaattaactttatatatgaccagagaataaattnggaaatggatgattaactaaatttgttaatttttaa

SEQ ID NO: 4775 - DNA, 1341 bp, Glycine max
tcaaatagtttgttgccattgaaagtttcattggagaatagtattttgtttcgaagctgccaagtagaccatgttacagccaaccaccaatactgccacctcttgacccttatgccgtcagcctgaacaaatgaatgttgaaggaaatgatgttttggatttaatgggagagcacctttagtattcaaccaagacatggtatcccaccaaataggttggattttgttgcagtgaataaacaagtgggatgcgtcctcctccacccttttgcagaaagggcatgacatgtccgagatctgcacttgtctcctctacaagtttttctttgttggcaacctatccctaaataatctccacgcgaaaaccacaattttgcttgggatctttattttccatagctcctgaaaacattcctcctgacttcaatctgctatctcctcccataacatattataagcactgtgtagaatatgtacctgatgggtctcctaaccactcccatccatcggattggtgttgttgtataggcttgccttcagcctctctaaagaaactaacagtcgaatcaatttcaatatcaaacagtggccttctccatataaaattccattcctaaccattgtcctgtgagtgcccatttgtctaataaactggttctgctgtgatgaaacctagtctgggatatttttctgctaatgattctccctggcatatccacctatcctcccaaaatttgattttatccccccctcctaccttccattttaatccattttggataaccgtaccctgatgtgaatgatgaagagccctttttaagtccctccaccaaattgattcagggcctaccctacctgtttcatccatactcctccatccaccatatttggactccaatactctagtccataatttcccttgatgctgcaaaagatgccacttccatttgtcgagaagagcaatattaaaagtgttgatgtccttgatgcctagtcctcccttttcttttgataaacacactgtctcctacctaatccatgcaatcttattttggtcaggtcctcctccccacaaaaatctacgttgtaatttcactagcttatccaccactaattgaggcaccctgaaaaaagaaaagaaataaataggaattgatgtcagccctgactgaattagtgtcactctccccccaaaagatatgtgtctctgttttcattttgccaattttctctcaaatttgtggataatgggatctcacatctgacatcgtctcgagttggccccgatgggtatgccaaggtatacaaaaggaaaagccaacatgctacaattcaggtaatt

SEQ ID NO: 4776 - DNA, 392 bp, Glycine max
gccccccctgcccacaaatagacactcgtatgcctgcagggattaccgaggtgcttattcaatggactgacctcccagactttgaagccacttgggaaccagtagacaccatcatgcaccaatttccttcttttcaccttgaggacaaggtgactcttttgggggggagtattgttaggcctcttataagtaaatattataagaggagagccaagacttaagatttattaataggactgaattgtttcagttgttgtttatggtagttatttcaagcaattattttaattaggtgcgtgtgtttttaggaccataccgtaactgccttaagcagttattgcagaataaattctggagtaacagcagggggaaaggggggggggggggggggg

SEQ ID NO: 4777 - DNA, 651 bp, Glycine max
aaaccagtcctcaaacttctgaaactacttcacctccatgaacagtgaatgttcatcctatgcagaccaggtcaaagtctggtatctatcaacctagacttcatcctattgccctagttcctaaagtgccagaccctcaaaatcttaatgatttcagacctatttcattaataggctgtgtctacaagatcatggccaaacttttaactaatagactgaagagaatcatgccggaaatcattgatgaaagacaatctgcttttgtagttggaaggcagctattgcatagcacaattattgccaatgaagtggtggaggaagcaaagagaggcaagaaagcatgtctggtgtttaaagcagattttgaaagggcttatgactcagtttcttgggattttctaatatacatgatgcgtaggatgggcttctgcaataaatggatccagtggatccagggctgtatcaaatctgcctcgatatccatattggtaaatggtagccctactccccaatttactccacaaagaggtcttagataaggtgacccactagcacctttgctgtttaacattgtagcggaaggccctaactggactcatgagagaagcaatccacaagaaacctataccctgcattcgccgccgggaaagg

SEQ ID NO: 4778 - DNA, 858 bp, Glycine max
ccatacttgcatgcctgcagttgtgcagtgcaaagtgtgttagacaactaaaatattctttgcagctattttttcctttactttttgctttcatttattataacagaagtttgtggttgcaggcatccttctcactggggcaaggtttgtttcctcactaccccagatggtgaaaattgtggactagtaaaaaatttgtctgtcacaggattagtaagtactgatgtaactgacgtaactgaatctatactgccaaaattggtggattgtggaatgcaagaacttgttgatgatacttccactcatcttggcagcatggacaaagtcctcctaaatggtgattgggttggagtgtgtcccgattccagttcgtttgtggcagagctacgaagtagaagacgcagaaatgagctgcctcatcaggtttacttttaatatcccattttaagtggttttgtaggctctactagtcatttttttaatattttaaaacattcttttagtttgacccatgtagtggatctcaccttgtgagaaatggcttttgttattgttgtatgtttttaatttgagcattaaactgtaaaatctagttagtagcatttggaaacttaagtcaatattagctaataattttattgcttagtttatgtctttgtgagggctgtgattgccaatgactgacattgtatatggtttacctgctccgcatgattggattaactgtttgggacttcctttttttcatttttttttctaggaatgatgctattgtttcctggcaccctgcctctgaatcaatttggcgtttttggtgtccctttgcagggcagatgatttatgaattatgaaccaatt

SEQ ID NO: 4779 - DNA, 754 bp, Glycine max
gttgcctgcagtatgaatggaccgaatattttcagtgttatacgaaatgctcattttgatttagatgtcaatgatataaaatgattgcaatcaaaagaaccttgcaatcatgtatggtactgttgacgaaatttcttgcacttgagccgtgaagtggtcccactgtgagatatccatttgcgtaaggcatgtctcctatatggaaaacaatgtcataattgtccagatccttgatgagttggtctgtggtgttgagagaaccatgttgataacagcatatccatttgaaccatcacgctcaacctcaaggacaagcaaacaaaataaaattttttcccccattttgttaatcatacttaaaattagagttttcattcaatattttctttgtgaatactacctttcccgtgtcaccaaatatgataacacgttgcaaagagttttggccaggatatggggatgccttaaacgaatacttcttgctccatatgtaagaatcgttagacagcacatgctccaacctgtaagtgtacctgagaagaggagcaatacaaaacccttcagaaacaaatcatagtgccataaacataaagggttagttatatgaatgttagaaaataaaataaaaatgaaggaaaataatatacgaagaagatgcacagtcttgaattaaataacaaaataacagtagcaaaataaatttaattgacaacacatgaatatgctttatactacatagcacaaaaaaaaatag

SEQ ID NO: 4780 - DNA, 857 bp, Glycine max
tcgacctgcagagttacgggtttgggttcctggatgcacttttctctgggttgtcttgcgttgtttctgtgcccttctacactgcttttctccctctgctattctgggtacgtattactacatgttatgctggtgatgtcagattcaacctacgaactttggttttgaaaaagtcaattttgttggctgtgtagagtggtcatggcaaattggcgaggcagatgacgttgttgatggcgttttgtgattatcttgggaactgcataaaggtgtgtgttgttcactttcatttaatgatttaattcaactttggattcggccattaatttatgtgtgtgtgatcactgcttttactgcatgttattgtattaaatgcttcatgtgtttgtcaattaacaggatgtggtttcagctccaagacctgcttctccacctgtcaagagagtaactgccaccagagatgaagaggataatgcgttagaatatggattgccttcctctcacacacttaacacagtttgcttatctgggtatttattattctttgtttttatttgcttttatttctaagtcatcctacttggtttagggctagtttagctggcatggcaacggaaagggattctgaggcatgtctttagagtgagtgagtttttgtgtcatgtcacaaaggttcatattgtgtggcggggtggctgctgagatgtgctgttgagatgctatgctagatacctaaactaattgatcaggtggcatgccttataataaagtaatatggttacatacacttactcttctccctatctattttctggtcccaggaagagaattaaatttactggatgattaaacctgga

SEQ ID NO: 4781 - DNA, 825 bp, Glycine max
tctctctagccagacagctccaaatttcctaactaaaacggaaaatttagcagtaagcatctgccatggtcttgaaattattgatagccaccatcatggtgcatcgttatcgaatctctcattgagatccaaagattccaggctaattattcctgtggaaaaagttgatgttcccgcccagacttttcttgatgataatgccaaaaaggaagattatgctatgcttacctgtaataactgtaaaagcagaatgcagcttgatgccaatgagattgccaatagctcaaatgtgcagctggtactgattgatcgcccggagtcaactgataaaccaaagaagcaaattcttaaagtaattgcaatgatctcagctgcattttctggtataacttacattcaatctattatttttcatttctttctattataatgcaggcagcagagaaggttttggcaggatcgataaggagagaaatggcactagaagagttctgtgcaaagcagacttctgatataatgcagctcaattgcttggtaagtttctgtatactgagaatcatctgtggtcattgttttgtgactattttcaatcatatttgcagttgcaaaagtacaggcaagaaagggaatgcaatgccacaatagcacagataagagaagataaaattctacgccttcagaccctattgatgggtgttttatccaccaaggagttcatggatgaagagccggtgtcccttgcacatgaaaacagggtagaaatgagtatttttaagttttctttttatgatactatctttcatggttatataggacttgcctgct

SEQ ID NO: 4782 - DNA, 1018 bp, Glycine max
atgcctgcagatgactgctagtgacaggggtgacaacctagttgggatgcctgtctctatcgagtcatgccattattgttccaaagaaaagcactatacaaatgtaccactgttttataacaaacaacaataatggatgttactcagatacgtaaacacaagcacaaatacctagaagtgaatcaaccacatgagaatctggctgtacatattctttgcatgcagggtggacttgttattagacatgaaatttccaaattggtataaatttgtcaacacatatattaagccataaattccattttcaggaaaatagtgaaagtgttcaatttattgcttagcaagaaaatatggtacaattgatgcattaatcaatcatgcatttgtttaagaaaaaaatcatattaataccttccatctcaacagaatcatctttactacttctatgcaaatcatcaattacatccttgtccagagatttttgaaatgctttctctttctcatgagaatcaaaaaccttaggaattggaagcaaggcatcctcggcattagctcggtctagtgcagttactgtcaaaatataggaacatcagttagtagtaacctacaacagcatcaggaatacaattactaagaaatataagatcagcttattttgggggataagttcaaaattagttataggatcagatagcaaaatatgtgcatcaaagcagctggtaataaatgtaagaaatataaccatattaggttccaattatacttcaactttgaataatttttttgcaaaataacaaaaaaaatgcgtggaaaaatattaaggccaaagttaccgttggctgtgcctttaattccagaatgtctgaaaaaaccttaaaattcttttcccccagcaaatttttaggttaaacccaaaaaaatccaaggctgagtcaattaaataaagacttgtggggcataaaatatggtgttctcattaaacaaaatttaaaaacctttttcttaaagtcaaattttt

SEQ ID NO: 4783 - DNA, 1154 bp, Glycine max
tgcctgcacctgcatgtgaaactgagagggttcagactcccaactattcactgtccaacaaagggcagaagcaaattatttctgaggcatcaccaaatcagtggcagaacaagcaggccactgtactatccatgaggacgcggactaaggtacacattgtcagccttgtgtgaaatgaaataatctgagattcctttcatattttaggagcaaagtcaaataatgtaaaagggtaggaaatttggtcatcttttaagaattatggttaatggttaatggtattggtagaggtaggtaggagtccaagagtgtcacattctctaataaccaatttttttccttcaaatttcactttcattttttaattaagttataatggtttcttagttgagggatatgctgactttaatattcttgagaaggtgcaaatgcaaggtgttgctgttggtcgtgcgtttgacttgaccacgttgagtggctatgatgatctcatagatgaacttgagaaattgtttgagatcagaggagagttgcgttcacaagacaaatgggctgttactttcacagatgatgaaaatgatatgatgctcgcgggtgatgatccatggccgtgagtaacatgaattttgttggcaactccactttcaatttcttatttcattgaacaacaaattaagtttaatttccacgcattatcaatatatttttttttactttatcaactagtaaaaaataattgtacacatgaattttaagatagttatcgtaaaagttaataaatttatcatacatgtcattagattggatgacaatgtaatatttttttttttacaatcattccataaactatttgctctaatttatttattttcacgtgccacctaacatgcagggagttctgcaacatggtgaagaggattttcatttgttcaagggaggacttgaagaagatgaaatgctgcaagttacctgcttcttcatcagaggttgaagagattctattgagtccagattcacagaatagggatgagactcagcagtctcacatgccttagacaacttggcttttttttttttttttactttttttggggtttgggaagtgaaagatatctgatggcataggttgcttaattttatggaactttcaaagc

SEQ ID NO: 4784 - DNA, 814 bp, Glycine max
tcctgcgaaccaagaatagggtccactggtgttggtctaacttttgatacaaacaagcaagagttactatccgtcactctagaacagcaacctcctggtcaaccctccagtaatttgcatcattgaattcctttattccaggaccaccctcgtcagtactttccttttctggcactttagagaccatgtttcttttcaatggtcctgcctccccaactatcccttctttcagagcctgttccatagccttctcagtaccttctaattctacacctacaaactcaacatcttcttcaaagagtgatggtactgctactgctctttgattcaaatcaacacccccatcaatcgaatctttagttggcgacctgtttgaaggaacagattccccattcgaaggaggactaggattagggctacctatttgaggtttggtagtagaaaggttgctaccagaagaatcatcatgatctataaatggattcttgcttgacccggcatcttgcatgtctgaaggttcaccccatcccacccagtcaggcaaaggcctgtccccaaacaactcttcattgtccgatgcctcaaacctgaagaatcccatatcatgtgaagcgcttgcctttttgctttcaaagttcaaggtgtctccattcatggaatcactaccagttatcccatttaagtttgtgcttgagctaagatgtaccatttcagattatttttgctttcatgcaatgttcatgctctgcaccactacctgatgatcactactggtggcaccatttgcagcacctttcaagttatcgcatcctca

SEQ ID NO: 4785 - DNA, 801 bp, Glycine max
gtcctggagcgttatggggagctagatttggtcctgccggtaatgggagaggatgcttcagtgataccactccagatctctcgtttgtaatctcaggaggctttatgcagcccccttccgggtggcatccgttgtcaaatgttgtgttgaacttgagtagctgggaggtgctgtgactcctagagtatgaataatctcattagtaacgcagaaatgcgtaatttggaatgacatgcactcgcatttagttatatagttgccaataatatggtaacgcattggtgttttcgttgttgtgtttaagctctaccgtgtttaggacttattttatcattgaagaactttgcacaatcattgtaagtagaccggtaggacagtaggatatatacatggatgtatggttcgtgcctcaattcatccagaacagtatatttatcatacggaactcatcgatggtgtgaagtttgctgctcccgatgattggagttccattgcaatcgaaagtgattccaaaaaggtaggtaacattaatagaaatgtaacagattggtctgaactaggtgttatttatgagggcataagattagcagtcattgtttgatgaatgtatttccaactttgttcctaggaaaggaactaaatttgcccacaagttgacaatgggcaccaattctcggttgaaggtttggcttggagtttaattctaggagatatactctgattctggtgctgtttaatgaatttgatgtatatttgaaaaaaaagataattagagatagtaaaactaacattaaatgggtt

SEQ ID NO: 4786 - DNA, 814 bp, Glycine max
aaaatgagacgtcggatagatcaactggcagtcaacgcaagaggaatcgagaaataatagtaatacactgtaacaacattttttgaacacactcttgtactcttttaaacaaactatttattatcattaactgaaatttattcaaatttataaaattttgcgatgtcaaactttatttgacaagtcttacgattttataatttttaataaattttaacctataaaatatatattaaaaatgtgttaaaaatgtattagaaagtgttattacttactagtattccttttatcttgtattttttaggcatggtttaaaaagcattctagctgccgattaatcttgtattaggcataatgcagaataaaatgaaaatgcacggttgagaaaataatgtacaagtaattcctttctgcttatgccctgtataaaatgagtgaaatgaattgtaatgttagttaaattagcctaccataccaaccaaatccatgcattcaaattgaaatgcccaaaaaagtaattaaaaattggagataagttagatgataaaatggcattattattggctaaatccgatcatcaattaaactaaaattccttaaacccattttatgttagttttactatctctaattatctttctttttcaaatatacatcaaattcattaaacagcaacagaatcagagtatatcaccaagaattaaacaccaagccaaaccttcaaccgagaattggtgcccattgtcaacttgtgggcaaaatttaattcctttcctagaaacaaagttggaaatacattcatcaaacaatgact

SEQ ID NO: 4787 - DNA, 777 bp, Glycine max
gaaattgttctcgtcccagaggacgtgatagtgtgctggtctacttgtaccctgtaaaatgccaaacaccaacgtaaattggatgctactacatgctacacatttgaatggttttcaagtttcaacaataggaagctgattgcagcaattgacacagtttctagtcctagctaatgtaacagcaccaacaccattatcgtacacaatggcggatctagtacccagagctagtgggggcaatttatttagaaaaaaatctaacacaaaaaaatgaaatagtgggttcaaacacataaaattagaggtataaaattaaaattttaagataaatacttatgattttattaaaataagggggtgtattactgcatttgtttgtcttcacatgaaaattgacagggttcaaacacaaaactacgggtgcaaaatataaaattttaagataaataaatatgactttattaaaatgagggggtgcactgcccaccctcattcatgaataggtccaccactgatcatacctgaattcctgcatgactgcacaagtagaagtcgaattccgaaggatgacagatcttagaatctaccacagtacctgcattacaatcagaccaatcgctcaactatgggatggtttacaacactggataatgaaattggataatgaacagacccaaatacctttttttatgccgaaatagtctttttaaatcctaattgaatacctatgccttagactcttgcacatggatatccttaaatagtgacaagcacaaa

SEQ ID NO: 4788 - DNA, 747 bp, Glycine max
  misc_feature (671)..(671): n is a, c, g, or t
aaatgctgagcacgttaatatcaaccttctgtcctgcttggcagtgaccagggacgccgcagaagaagaagtggtggccatgattggttatgttgatggagtctttgccagtggtgaaggtagcaataggggatgatgcgttgcatgtcttgtaaatggcatgtgtcactcgcatcacattatggaatttggcattgtattcaaatactggaccaaaaaataaatcaccaaccatttgagttatgttatgttgctactactaataatcataattaagtaaaggccatgctctataatgatttttgggttgaatgtttatgaaatatatactatgtaattgtcggcggtgaggccaacaatctcattgcatgttgtttttgtctcttcattcaaaagagctcgtgcagagcagcagagcacaaaaagttaatgcaagtggaagttgtgggtcatgctggtttacaactctagtcatgaaactgatgtgtaaaaggctcttgtataagaataaataccataagaaaaaaaatagtgtatagatgagtaagaaccaagagttttatgtagcccccccctaaccacatagtttttcttaataataaagagaaacaagattaaaaatagaaatgcttgccattggaagtgcaatggtggggtactttgatgcaaanaccagaaaagaaagatttagagttttcaaaccaaagggcattgctgaaatttacttgaaaacataatcttttagtt

SEQ ID NO: 4789 - DNA, 1351 bp, Glycine max
  misc_feature (12)..(12): n is a, c, g, or t
agaactcttcanaatcagatgtcacaataaaccttgtagagtactcgatatcttgatccaaaagcacaaaatatatatgcatggtataattataaatggctttgaaataagaagatagacaattcttcagatgcaggaaaagcaacatggatcctgaggtggccctgaaagtatgatttaggtatgcaaaaccagagttataaagcccttaatttaatagtttttttgacaacttttggtaagagcacaagttaccctcacactatttgggtgcaagactaatcctcacttgggcattgccgccctggtcacaagttgcttctggtggattttgaaccctctgcgttgcaagtgcacccaaaaaagacaagttccaaaaggcacaatactattatgcgtgattaacaagcaagcatattataacttcatatcagaactactatttctgaccatatgtgtaagcatgtgctaaatttcaggaaataaaccatatgatctactaggttagaagtaataacatttaaaattccttttcatagtttatttgttcattcaggtagatcatgtaggaaatatttcataagtgatataatttccaattataactttgcttatattgggagtcaataggtgcaggaagctcatctttaaatgctttttctgtgacaattaattatttgtcagcttcaataaatgttatatattaatatatgtaaaagtcaagtgtatgcatactacagggatccttgactagaatttaagcttcagctcattgcacaaatttctatagttgatatcattaataatcttttgtctattcataagtacagaccttgtgtctggctgcattgcttcaaagcttgagacacgtcttaggttagctgcaataaaaaagagttaacatacaataggacaaacttcagttatcttcaattatttagatccagaataatgaaataaaatgaatattttcacattttgaagttaaatataaagtcattttttataaaacaatccatatggtccagcctaagatgtctcaccgacctctgtctttccgctgagtagaaacaccctcaatggctgtaaagatatcaggtgtaaatacgtacacaccacagtttatacgatcacttacctgcattcaggtatgctgatagtgtaagacagtaaacaatggggaggaaaggaaagattttcaaattttacttccacaattcaaggcataagcacaggatgaacatacaaaagtttcgggtttctcctgtgtaatgcaatagttcattagtggttggatcagctactaattccccgaactcacttgctgatcctgcaggcatgcaagtatggc

SEQ ID NO: 4790 - DNA, 778 bp, Glycine max
  misc_feature (741)..(741): n is a, c, g, or t
tagctagagagcagctgcaacaagctgagtgaaacaaacaaacaaaacacttttgtaaaattgaataaagggaatattttcaatagattcttcccttttctttggctaccttcaatgtcaaacatcacaagttgtgatagtgggagcttctctacagagaataccagagaagatgcagtagttaagcagcaacctgagatacttggtcagttccatagtccacattctcatacttcaactacaacaacaacaaataatagcaatggttccaacacagactcacaatcacctgcacctgttaagaagaaaaggaacctaccaggaaatccaggtaacttttctaacaaccatttctgaaaagtttactctttttcagccccatttacatatatagtgatgaatattattctttgttttcttcttcttcttcttctaattcctagaatataatatagcaaaaattctggtgtatatatataaagcctttcaattcatggaaaaaagtaggatatttaattttcttcacccttctcgttgatttttaaaatgaaataatcgtgcatagcttgcttgtatatttactaaaaatggggttttatataataaaattaagaaaatgatatcccagaaatggtctacaataaatttctggatgatgacatgcttaattaattagagcacatttaattaagatatttacatataggctccataaaattaagagatagagccttgatctgntagaagtcatcttctttcaaacggagacaagatctgg

SEQ ID NO: 4791 - DNA, 818 bp, Glycine max
  misc_feature (691)..(691): n is a, c, g, or t
ctcaccaacctatccaccacaactttaggtaccctgaaaaaagagaagtaaataggaatcgatgttagtactgattgtattaaggtcactctctcccccatggatatgtgtctctgtttccacttggctagctttctctcgcatttgtggataataggatcccacatgagacctcgcctcgggtttgcccctattggtattcccaggtacaaaaacgggagagccagcattccgcaattcaaatacttggctgcttgttgctttcattgatgtgattgaccaaaagctccaaaacagcactttgcatagttgatttttaggcctgaggcaagttcaaacgttctaagaatagctttaatggccgtaacgttctccatggttgcttcccccaaaaagatcgtgtcatcagcatattggagaatgctgatatccacaagatctgcacctatttggaagcccttatacaggttttcatccttggctctcctgatcaacccgtttagactttcagccaccacattgaacagaaaaggtgctaaaggatccccttgcctaaggccccttttaaggaggaactcagtcgaggggctaccgttcaccaaaactgagatagacgctgatttcaagcacccctcaatccatttgacccatttagaattaaaacctatttttcccagcatgtataacacanagttccaagaaaccgaatcataagccttctcgtaatcaactttgaagacaagacacgatttgttgtttgatttggcctcatgaaccacctcattcgcaatgagaacactttgtaataagtggtcttc

SEQ ID NO: 4792 - DNA, 815 bp, Glycine max
acttgcatgcctgcagctatatataaatggtcataggaatctgccatcttgagcaacaagttaagcaattcttattcacacagagagagaaaagatgggaaagttcattttgagtactggtcttatattgtttgtggtgttattcactactgaacttggagtagcatcagctgtttggcagcgagctcatgcaactttctatggtgggagtgatgcctcaggaacaatgggtaattaaaacgcataacttcttaattgtctcaattttttccccttcattatttctctagctagttcaattaaaatgtaaagcccccagatattaatttaggtacaaatgaagagcaccaaacaaataatcatgagtaactcaattagcaattgtcttgatttgtaggaggtgcatgtggctatggaaatctctacacagatggttatggcacaaaaacagctgccctgagcactgttttgtttaatgatggaaaatcatgcggtggttgctataggatagtttgtgacgcaagccaagtgccccaatggtgcctcaggggcacttccatcgatattactgccacaaatttctgccccccaaacctcgcacttcctaatgacaatggcggttggtgtaatccccctagaccacactttgacatgtctcaacctgcctttcagacaatagccaagtacaaagctggaattgtaccaatcttgtacatgaaatacgtatgttttatgttatgccctatatgtcttaaacctggattttttttttattttttttgcccccgttgaaattaagtcttaaataaattgac

SEQ ID NO: 4793 - DNA, 766 bp, Glycine max
aacaagtaaagaaaattatccaaatatcgattccaattatctcgaatcactgtttgtttctctttgcgttataacaacaacacaaacactgagataccttctttgtaaaaaatctagagcaacaaaatctacaaggtccaagtttaagaaaataatacaacaactaaaaaaaaataacatgttaaaggaaccgatagacattgccatctcatatttcttatacttgcgcacacaaattaaaatcgaaacaagatatatagtacctatatgccaaatgaggtcctaatgttgtaatttttgtgcaagagaaaccatcatgcaacatgaaacccaaccaaagaaaggatgaaatcgtgagagcaagagcatgtgaaataacaaacgaggtcactccttgagggtattgaaattgaaggcactagataaagaaagaaaacaaaaaaaacggtgagagttgagatgggaacgagatcacaatcaacaaaagaaaaaaaaaagatgaacaatgggacaagagtgtgatgtgtggtgtgtacttgtgctgtctcagtgtcaggccaatggtagaaggcgaaaagagtaagcaagatgggaggggcggtttttgtacatattcatagcatatcattgaaaatttagattgacctattaaatttaacctattcaaacttaattttatacccataattaatttgcgtatcgggcggttgcacgtggtttttattttctgctggaaaatgatcatcccaaccacaaattactttaa

SEQ ID NO: 4794 - DNA, 851 bp, Glycine max
atcctcttggatcgacctgcagctattatatgaatatgttacatgcattgtatgagaactatttgattgccactattagctgagtttactctcgaatcttgattagtcaaattaattttggaatacccttatggcagtacaagcttgagaaattattgcagcagagtttgaaagcaaaagaacatgcaggtggatgatacaagggactcacgcattatatgggatttataatcttacattgtcacatgagattggatgcggaagaaacaactcctccccttcagcatcctcatcagttctgtaacgggaaaattatgtgttagatgaagaaaacaagtgtattaggaatgtctcttgcaacaaaatagtgaaaatattcaaattttatttatattgaagtagagcttcatatattggtggtatatatatatatatatatatattcctaggaatattctacctgtaatatttctgaagcaagtctaagttgcggtatttggtttctttctgaacttgatcaccaggaaatcctgccataaacaggagggtgatacccaatgccttgaagaaaaagcttccactgcgattatgaaccaacgttgccattcggcacataagtggcccaaaagacttcagtttgtttcttcccatcggctgcctcacatatctgcattatgttattcaatccaaaaattaattactctatattagactgaatgtaaatattttcaagtgcaatattcgttagacccatcaccatttataatgaagaaaaactactgttaaaaaaagaaagccgaaatgggaaccttagaaactttatcatcccaaaacttactcattttgaagga

SEQ ID NO: 4795 - DNA, 822 bp, Glycine max
  misc_feature (651)..(651): n is a, c, g, or t
gtcaaaattcaagcaaaatatatttaacattaaaatatctcatacgcagtcgtagtctgaactctgaaacttacagatcgcgtgcgccttacatgtatggcacaataataaccatgagcagagcaacaatgtacatatataagcctcactcacttttacatattcatgttcccaaccgtcacaaccaaactgagcaccttcaaatttggggaagcagaaaagggaggcaaagaatacagagtcaagaaatataaaaagagggagaaaaaaaagcatataaaacggagcagctatgcttcaaagagaattaaaaaatgaaatcgtagaagcttgtcggcacacttcgccctcaattcacctcagccattttctctctggaagaagcagaaatcaagtggtaagtaacacaaattacaaagcagaacttttttctttttcggcacaagagatcaaacaaatacaatcatacattacaaatatcttaaaggtaagagcaacattgatatattggcaaatatgctggtctaagaagaaagtgataatcaagtaggcaaatattaatgctcaaaggacaaaaaacaaatgcacacaaaatatcttgccattaaaaggtttgcaacattttttcattaacaagggaagatctgcctncttgcacttgagcctcaaaaagtggcatttccaacattatttttaaagaacacaccccgaaaacaaactgatggaaaaaatgccattaacatttctagctcctctccagccccaaacaacccggatgatcagaaacccaaaattgaatataatcatttaactttgggcata

SEQ ID NO: 4796 - DNA, 795 bp, Glycine max
tcaacatttccaatcatgagatatcagccattaagattgcaaatttagaacatacttttaaccaccatatatagcctccacacattttttgttatgtagcttatatatgttgcctgttgatccaaaaggcaatacaacaaagcaaatttatgaattttcccctgtaggatggtattatgatggtatcaaaatgactagtacaaaataacaagagaaacagaaaattatgcagcagacactaacacagtctgatcattatttttcttttataaaaccattaaaaagctgttccattttgacaggtgagggttatgcatttctgcatattctattctagtatgggaactctcctgtttatgttcccagaattgcaccagtcaaatgcaaatgtctataaatctcatctttagtgtgcttttaaaatattaatatgttaaaacagattaaagaacctttttatgtaaacatggaattcaacaatatctttttaactcaaaatagcatcagccaaatccccatgttcaaaacatctgcactcttcaagccttctaaaatcatttcaatcatagatggatgtttattatagccataaccacaaacagtcaactataagtgacacaattatcattctaatccacaaacaagcagcatcacgatatacagggacagaccccaggtttgggagggttggggggagccattatgataaaaaatttactaaatttaaaataaattggtacttaccaaattattttttacgacaatagcattagtagtaaaaaatcattgagaaat

SEQ ID NO: 4797 - DNA, 707 bp, Glycine max
gaagtgctcatcgaatggaaagatttgcctgactttgaagctacatgggaatcggttgatgttatgaagtagcaatttcctgcatttcaccttgaggacaaggtggctctcttgggggggagtattgttaggttaccgattaagcaagtgtatgaaggaaggacacatggcaagtataagaggaagtcagagcagcagccagagcagccagaaccaagattaggtagctgactaagatcagttacagttagtagttagctttgtaactgtttgtagttagccttgtaactgttcaagtcagttaaaggcagttagttagtcagtcttgtaaccgttcaagtcagttaaaggcagttagttagttagttagccgtcagctataaatagaattggactgcctggaattacttaggcaggagtagtcacggtggttggttagggagggtaggctccaatccctagttgtgcatttgtactacaagagtaataaaacaagagattgggctggtaccatcataaagctcttacaacaggaagactcacaacagccactagcttcctcaggagaagatttccctgtctacaaacttgaaaacacaccaccttgactctcattgcactctcttcccaactttaaactcttaactaggtgtaacaaacttgcatgccaacatcataactaattaactccctctctcctatggccc

SEQ ID NO: 4798 - DNA, 763 bp, Glycine max
atacgattcggactcgtacccgggggacctctaaatcgacctgcaggaactggtgattgttggaatgatctagcagggagtgcaaagccattagccccccatcctggcctcattggcagatgttgatacatcagcccagctcgaggaggcacatgtgaaataacaccagtagctgcatagtagtaaggaggatatccaccagggataatggcagttgatggtccagatagtcctgccacttgctgtgcatactggagctgcaattgtgctttcctatcctctttcctctgagcaagagcaacatatagtggtttaccatgaaacatgaatcctgtggcacataacatcaccttaagtcttaaacataattacggcgttgcagacaaatgatgctaaatgaaatgttatttacataaaatttccactaaaaaatatgtaaagaggaagagatgcaatttttttagatcagaccttcagtcccaaaccaatatacaaaatatattttcagatttatggatatcctttatttgggttaacatgtaggattcattgtgtcacatatcacaagtaatggagtatcttctacccttgaattttagtaggttaagatcacagtatattttaaattaaatcaatagttgatacacttatacaccttggtgcactttactggtaagcttattttaaaggccttattccataaaccaaatggctaatagtaacattatctttaaattttttttgaaagaataatcaataacac

SEQ ID NO: 4799 - DNA, 1257 bp, Glycine max
  misc_feature (1161)..(1161): n is a, c, g, or t
  misc_feature (1179)..(1179): n is a, c, g, or t
  misc_feature (1209)..(1209): n is a, c, g, or t
aaatgttgcagtggtgtagttgattgaaacatagtaaaggtttgaacttgcagttaacctatccatcaaagcacatacaaaaaacaaaaaacttaggatatcacgtcactatcaaggagtatatcatttagaaatttcaacttaaatctttgaattgacaatgttaagcaagtaatggggtcaggaaagggacatatcatacccaacaagggaaactagaaacaatttgcacaacaatttgcacaacaagttgcatgacaaaggagctgattgcttgctgcaaaatcaatgaattgcaaaaaattaacaaacaaaataattttttaagcatacttatggaaaggattaacaagggatgagtgtaaagtgtaaaatataaactctttagaacctgtcaaagaaagcaaatggagatagagcaactgatgcaaaggcttgtctataaacaacaaacacataagggctcattcccttggaaattgcagccttggaaagcaaggccattccagcatacacaaactgaatgaacaacattgcaacatagggtctatttttttccacaatggccacacgccacaacaaaaaactcttcattttgtgtgctacctctgagtgaccacctagcaaggaaaattgttcaatatatacagatttttggactcaatatatggcttgtttgttggctttatggttttctttattggctttgtgctttatatatattttgacaccaaagtggcacgaatttggcccatacattgctggtggtagcgaaattttacaaaatgaaaccgcaagtcaaaattaaacacccactaatctgcacattagtttcaccagcttagcaaaatttacttctcaaaatttctcataaaagtaacgtggttttctgatgttccagtctattaccagcaagttgaagcacccacagtgtgagagacacatgaataatcaccaaaaattatgttgccccagcttatttttccctttttttgtccttaaaagtaaaacttgggccaaacacactttatataaaagtccttaaaattataagtagcttatttttaagactaaaagatgaaaataaggagctccatggagtagattttttataccttgtgtggagcttttgctagcatacaagccttaacatcgacatcnccctatgtttctttcagntgtatttcctttttcctaaaatagaattcnagttcccttcttttcttatatgtgcgtgcccgctgcaggcatgcatag

SEQ ID NO: 4800 - DNA, 778 bp, Glycine max
gatatcggactcgtacccgggcacctctaaatcgacctgcagctattaggtcagccattatgacaacatcggcatatattcgacaatactaaggaactcatcaaggacattgctgatgattacaaaccagcctctcctttagccttgggatctggtcatgtcaaccccaacaaagcccttgaccctggacttgtttacgatgtaggagttcaagattatgtcaatcttctctgtgcaatgagctccactcaacagaacatctcaatcatcactagatcgtctactaataattgctccaatccttccttggatctcaactacccttctttcattggtttcttcagtagcaatggttcttctaatgaatcaagggtagcttgggcatttcagagaacagtgaccaatgttggggagaaacaaacaatctattctgctaacgttacacccatcaaagggtttaatgttagtgttgttccaagcaagttggtgttcaaggagaagaacgagaagctaagttataagttaaggatagaaggtccaatggtcgaaggctttgggtatctgacttggacggacatgaagcatgcggtgaggagccctattgtggtcaccaatcaggcaccctcaaattcaatttccatatagatcaattttgtgatggataaatgtttttcatatgtttgaagttaaaaatatatattaatagaggaaatgttcgtacatgaatgattatcatttctgattataataataattttttttggaaaagttttaacac

SEQ ID NO: 4801 - DNA, 837 bp, Glycine max
gacttgctgcctgcaggaagcaaaggcccaactccgtccaggacggtccagtacggtccaagatgatcaagctcaccattatgcacatttctttcgcctcccaaacctgaacttgctgcaacagttttaaaagaatattaatattaatattaatattaaagtttcctacagtaagttattatttagaataaacagaaaaaaaatttatgtgaatatttatttttaataaataaatagtattcataaaaatgctaaaatcaagcaagtaattttcctacaattttaaaatttgcaagaaaattacatacaaatttaaaatccacaagaaagataaactgtgtattttaaattcctgaaaaattaaatacaaatttaaattccgaaggaaaattactagcgaatttaaattctaccagaaaattatttgcaattcaccgaaaaattacttgcaaataaattatctgtgaaatttctagcagattcttttagtaaaactttatttatagacacaccactttttatgtaaaaaattttgccgcagaaattgttgtatttgttctagaaaaattagcaagaaattttctatgagtttcaaaattttcaaaaaattaattatctactaaggtattatttaggaacccaagtattggaaattcacaggtaattagtaataagaaaaattctataagatatcgtaaaaatatagatcacaataaagcaagataaacgtacggtgaaaaaaaaatgttaaaaggaatctatcttcgtataaactaatgtattatttcagtacgtagcaattaaaattgggggttgctgataaaaaaaaaaattaca

SEQ ID NO: 4802 - DNA, 665 bp, Glycine max
agactattacgctgggatgagtaaaaaacataagttaggattgaagcatattggcttttttattactaagtttttattgtcatggaaaaatgtttgatttgaaagcacaactttgttcataatttcaaaagctaaaaacagagttttagaaaatagaaatcaaacacacaccactcactttaatagaactgctcaaatcaatgcacgagacattgatagtaggctattaatttagatgtgtagcataataaagaaattttgttatatattctgaaggtgaacctccaagaaagaactcttggctggcgtgaccctagttttatacacacaagtttcctgaaagaactttggcaaaatttgaggtattcattgttggtaaatctttgtgttttaatttaaaatttataaatatatattaatttcattttacaaaataaaatatttattttagattttcttaagattttgttttaatgagtcaactagtttgttagatttgttttgacaactgtaggttaatttacagcggtcatattttcaacgatcatactttatttgttgtgcttaaggtgacctgtgcctatatattctctttcctcatttctaaaaaagatgacagaactattttctcccaaaattttctatatcttctcttataaaataat

SEQ ID NO: 4803 - DNA, 815 bp, Glycine max
  misc_feature (730)..(730): n is a, c, g, or t
ataagaattttatcacatcatcagaaattttctaatgtatttttcagaattgcaatagcaaacatgctttggaatgcaagaattggtactgatttcttgacctagaaaaaaagtacagttacatacaggtccgcacacacccctgccccactccaaaaaaaaaaaaaaacaggctttcaaattttgggaagtactatttaaattgctgatgactgaggataaaacacaacaatatatctggtgtcaattgctttagtccatatgatatcaccatttagtcagcttttaacaccactagtccaacatgcagaaaaataggaaacaaactagaaagtatatgtataaagaaaattatagaaaccaaagataaacttcattttgctgactgtcactttgttagaacaaggaaagctttgtacaacaccaatcttcaatatttcactaagaattaaaaaatcacaaccaaatagtgaactcacctagaaaaggcagaagcatttgaatggttcaatatttgcctttccttgaatgcagctttacatgagcttccaggaaaatctcttcttaaagaaagttccaattgtgtatcaaaatcaaacttggcagtgttaccactactgaaactacatttttcatcagtgctctttggaagattcttgaatgtagcaatcaagtcaatggcgccagtagaaggatctaccagttcatcactgcatctatgaatatctgnattaatttctggattgggatttatcaactctattcttagaaacttcatctgatttctcgtttcacggcactcatagctttgacct

SEQ ID NO: 4804 - DNA, 869 bp, Glycine max
ttcggactcggtacccggggtacctctaaatcgaccgcaggtggtttctgacagccttgacagctagaggctctacccttagccccaactcatcagtcagcattggaggcaagggttggggtttcattgcaagagccacaactttctttaatagagacacgtgaaagactggatgaactttactcttgggtggtaagttgagctagtaagctactttaccaatgaccttagaaatcagatatggtccataaaatcgagggcttaatttctcattcaacttcttagccaaagatttcaaacgatacagttgtaatttcaggtaaacccaatcatccacagccaagttaacatccctacgatgcttattggcatatgctcgcatctaatcctgagccttaagcaaattagttcgtagttggtccaacaaagagtccttatcttgtgtcagcctgttgacctcctctattgtcgaaggaacagttgtgcctttaagaaattgaggttggtctctgccatagagaaccctgaaaggagtgagcttagaggaactactatagttaagagttaaaccaaaattctgcccagcttaagcaggaaggccaatgctttggtttttctcctgtaacacaccttaagtatgtttccactcttctattgaccacctcagtctggccttctgtttaagggtgatatgctgaactaaatttcaatttagttctagcagattttgaatagttccctccaaaattgactcagaaaaatcttgtccccgatctgaaatgatggtgtttggaaaccccatgtatttcacaacctccttgacaaatagatcagctatgtcctttgcagtgaaggggtgagtaatgggg

SEQ ID NO: 4805 - DNA, 791 bp, Glycine max
actgcacattaacgctgggtttttgtccgcctcgaagaaaggatttggatgaacttatgtcaacgctgcatcatgccaaccagaaaacagtaagattaaatgctgagaactgacaaggtaggatatcagaaactatgggataaagaatttaaatttgaaatatgccaaaaagtccttttgtagaagaagtaatcataatttaaaaaaaaatacattcttaccttaaaaaagtcttaatagtaaattacaattgaaaagtttcatttgttaaatctaatccaaactgtgcaatacgcatataattaaagtctaaagaagccatatgggtgttctagaagatagttacctcattttgtaaagagtctatggggttccacctgtgcttctagtagaccttggagctgatttcatttgtgagatattatagaggactttgaagcatgccttcatgtaatctggtggctgctcaatttttgtaatatcccatctgcgttattaaaaaattagtaatcattgttttaaatttcttttcatctttccatataaaaaaattattttcatataagatcttaaataataattagtgaatggcatttacctgcaaacagcttgataggcaactgggaaagaaatagctaagaaatggctaattgagataagttttctgatgatcctttattaattccacttctttacatgtttatactatttcattctaacagaattcaatttgttataacagaattatctagcatcatgctcaacaactaattagggggaattgctattac

SEQ ID NO: 4806 - DNA, 803 bp, Glycine max
gttgcctgcagcatgattgctctctattctagcatcttgtgagagtgcatctggctgggaaggacccacccaacctccttttacctcattcaacttcacttcttgaggatcagttatgctagtgtttccttttagctgagttttaattacagaatcacttgggagagttacttcgaaatcatcctccgaaacatgtagcttttcctttctaagagaatttagattgctaagccctgttgtcttagataattgcattaaagggagaaacatagccatgagagaactgctagatgagttttcattatggttttcttggctttctgaatcaactgaatcaacaggatcagcaaacacataaatctcatcaacgtaaacacggcctttgttctgaagcgagagcagacgaagagtaacagaaatgcaaggatttgcatcattaatctctgctgtagcctcataaagatcctggagacaggaaaagagaacactgaaatcagaaaatcaaactaacattggaatgataccaccatctaatgtggcccatgagaatctaaaagttaggagaagaatgcatcatttgaggtatgtttgcgtacttttcaattttcaaaataacactcccctttcctaagagatgaaatgtaatactttcttttccattttgataaaatggaccttcacttttcatgatcgagcccaccaaaagatttttcctgactttgtcaaaaccttgcccgtagcatcgctaattttgaataacctactatcagtagaggttcaagtctagctgctgctattgatgt

SEQ ID NO: 4807 - DNA, 777 bp, Glycine max
  misc_feature (715)..(715): n is a, c, g, or t
  misc_feature (748)..(748): n is a, c, g, or t
agcccatcttgccacagatatataactcgtatccaataatatgaatctgaaggctgatgggtttaaagcttttggcagttattgttgtaaatcccagtgtgctggacttgtattgtatgagcgtgactctatggatccagatagattacttggatgaaaaagttccttgttctaactttggcaagtatctatagaaaatttcaaaacttgcatttatcaatatttaatttgcttcttgaaagcctttatcatggttacttcgtgagtacatcaatgtggcaaagaacttgcatatgccctttataaacaaggtaaaggaaaatgaagatcgtgtgtgggaaatacagggatggaatcttgtgtaatttgatagaggctaatattttcttaaaaaagaaacttatgacaaaattaaaatagaatgaaaaaaccatgctgcatcagcttctggttgatcctaaatctctggcttctctttcactactgaaccttggtatttcctctagattctttcctttttgtttgggtaccatccaagttgcttgtgaaatctaactactttataaaactatgaatatgtacaattgagtgaattctaaacgccaatactacaggttctgaaaaacacttgcgtcactgtcggcctgatcttggttctatgctaagtacaagagccaaagcgcacccacctagctccaagattcccttgtgctangcaaactacatatttacacagggaatcttgcanagaaaatgtgtttggttttggggtccaaa

SEQ ID NO: 4808 - DNA, 859 bp, Glycine max
  misc_feature (768)..(768): n is a, c, g, or t
acttgcatgcctgcagcaccctccctcttcaacttcaaccttcacttcctccttcttcaacccgggaagacaacgttgacacgtgagccgccggagtctccttccagtccacgcgagtgttggctatggcactgctttccccaccagaggaaggcacgtgacctgtggcaaaaaggaaacccctcgaaagggtcccatacgtccagagagaatgggtcgaagacgttgcttcgtctaccaccgaacaagtttgggatgatagacatggtgattttctttgtcaagttatctctgatgaagggctttcttacaatgctaaggagaaacagaggaagaagctttatatagaaaacaagaccagtgtctagtattttcgaggaattctattaaagatacccatgcatggagacacgtacattaattaccttctatagctttctaggggtttctacttctattaaagttgggttttgttcccataatttgtttaccattgtttgcttggtgaatccctaaagaatctaattcaaatatattgttatgatttttaattatgagttattatattaataaaaactattagtttatataataattatgtacaagtcataaagtaattttaattaatttttttggtacaaatgtaattttaattaattaattaatagttcaaaatctttatatttataatgtattgaaattaaactaaaaaacatagaggccatccctctcatttgaacatttgtgtatgatgtaggtgttctgtcnaacgaagatatgaggtgttgcaataacaatgtttgtttgtattgagtgtagatgccaagggcagccacgtccaaaaacactttttcttcct

SEQ ID NO: 4809 - DNA, 1367 bp, Glycine max
atctgacttctgtggggtgaccggaatgcccctatactactgctgtcgaactgcatctgccctaaattgttcgaggaataactatgtgagacactactagctgatgggtaaaaggaagattccatcagctggatgttgccactgttatcaccaagaccatgccccaggcgaaacggtctatcctgtgaacctgcaattgttgggctgagtggggtctttattcttccatctcctgcaataccacaggtacaaagacttcaaagctcaatcacaaagaaataccaccaacatagtacacagactgaacaaagacattcaaactatccaaaaggagcaactcagctataatttataagaaaaccaaaaccaagcatagtatgctgtgaaagtacacaatgcacacttttgaaaattacaaatgttacttacattatcagcacatacattaggatgtagtataaattacagtttttgatttaatagcatttaatggagggattgtttagtacatcagttcacagccatagcatctgccaaagatttactcaaaagtctaaacattaatttgatacagataaattgttagaatattaaggattcactctaaattgttctctttgttttttgtcagtattatggtgaaaactacattcattttcaccatttcctatacaattttttcaaaataggaaacaaagcaaaaacattgttaaatttaatattgttgcacagtaattcaaagtgttaactcatgtctgtttaagtggttaactctgttaggtatatagttaagtacagttttactgataagtggttaacactatttgtaagagtgattgactcagtagtttctagtatgcaacctgatataagtgacttgcgtataaatacctatgactaacacagagaacacaagtgattgtgtgatcaataagattttctaccattcctctcattttctctctagagtgtgtttgcgttcttctcctcatctccaacatatataattattagtaattagtgaaatcatgaaactaaaacagaaaaatattttctcaaactaaatagagccaatatttccaaaagcaccctgaaatggaatagcatagggtgggatggccacaaattgaagattatcctagagtttggtagagttaatgtggtcttcgaaaatggctaatgattcttattagctctcttcagtttatttcaataagtaactcgataaagttcattaaaacaaactcttttcagtttatttaaacaagtttcatagcatattcataactaataatacacaaatggggagttagaacaatgtgaagatcaatgagtggtcataatacacagaaaagaattatcaggga

SEQ ID NO: 4810 - DNA, 677 bp, Glycine max
cttgcatgcctgcagttttaagatggaaaatcaataaggagtgcaaggagaaacatgctgtttctccagcctttaaggaaagataaacagaagaaaatgaaaattaaatcaaaattacatgctgtatttatcatttaggaattacagtgacatcccgtgtggtttcttgaaatttcacacgatatcacagcccttttaatgcacacaacagtaaccccccttacatggtacacattgtaatgtgttcaagtaacaagggtacacaatgcaatgtatttcaaacaaataagggggttactataggggttaaaaaggcagggaaagcgtgtaaaacttcaagaaaccacgggaagtgtcactgtattttgcctaccgcttatcaaactgataaacataattagttccccagttgaattcacccaccgcttctacaccccccccccccccccaaaaaaaaaaaaacacacacacataacgcacacccaaaaaattaaaaaccttacataagatgacatgattgacaaacttgcttgtaacatttggtacagagcatctaaaattttatttacagtacaaatggtttactttctctgacaaattacaagactataacaccaaatctgacaaaaagcagaaagaaaaggttactagaaagaaccggatgacataaaagaaat

SEQ ID NO: 4811 - DNA, 1305 bp, Glycine max
ttcagcttggttcttattatatgtatcttggcattcagaaccagctgctaatccactcccattatgtatctacagtacctctggtactcatttatatatatactacttacttttgctgagcaaaaaaattaaataaataaataaataaaaatttagaaaatattacgaagccactgagatcccttacaagagcagtatttatactgctgagattcagttgtaactgaaacctaactagagctaactgtcaagtgactacagttattaaactaaccagagttagttactcatgtacacttacattgtcatagtttgatcttggaagagctttaataaaggcgtcttctgtttggtggtattaatgaacatgacaggccatatagagcctgttatgttctttattcagcatggcccccatacatcattttggattagtgatattacagtatacttactcggtgtcttttcttttgctttttagataggggatagctgtcacactgagagttagttaggttttctgttttgtattgcacagctataaatagctatcttctcctttgttgtaaaccaacaattctcagaatttcaataatacaaattacagttctgttcataaattctaatatggtatccagagcacagtttgattcttaacttagatctatggcttctgatcaaaatcctcctccacctctgacacttccgttcaatgtggaacctatttctacctttccactgctgtcatttggtggctgctgttactttctctcactctatttcagagaaattatatacgaaaaactatctcttcgggtatcaacatcctgtgataaaatgtcaccactgattgcatcattttcttgtcaatcctcaaattcctcactgttgaagatcatgacactggcagagtctctgcttcttatcttgcttgggagcagcaagaccaacttctcttatcatggcttcaatcttctatttcatgcgaaatgcttggctgtgttattggttgcaaatctttgtggcaactttgggagaagattcacattttcatttgcacactaatgtgatcgcactgagctacacagcactacacttgagaatagcaacatatctgaattcttgcttcgtattcgggccttagttgatactctcatggtgattggggactttgtttattctaaagaacaaattgatattattctggaaggggtgccggagcgaatataatagcaagttctactctcttatcagtagcgaatatgaaaaaattgatctacttctaatgcctcaccacaacttcct

SEQ ID NO: 4812 - DNA, 831 bp, Glycine max
cttgctgcctgcacattctccttcttgcaaataagtttaagtctccaaattcagttcagaacaaggctaggacccaattacttaataagcaacggttgttatctgaggttggtttccttgccatataaagatcattaagtcttattttcctgtttaaaatgcttggttaatggttaagaatggggtactttgaatactatatgaaatttagacaactatgataatttttgcttgtgccatgtgaataacacgggttgccttcctcagtcctcaccttggagtgagctaaggctccctctcaatttcaatgtggaggctttttgaggcgagacattcttgtgaactgagccaataagagcattcaatctgtttgacaaaatcttctagggagggatttcaaactaattttctcaatctttttgtctagactgtttattacacgtgcaactaaaaattttctttacacagtcgagtgtcaatagttattggtgttttctcggtggtttccaaatttggtcgtagttgcaaatacggctgttagtataatcatgctttgccatttatgtagtgatcttaaaaatattatggggttaccataatagtcaattagtcataccgtactgaattttgtttccttcattttttttttctcctggtaaactacagggcagaaacttgggtcactacgcagccaatatggttgatgactgatgcgttttgagggggacatctaataattagcagggccttgtgttcatttgatgattcaatcattaattttatacttcatttttttctggcctcctgcccttttgacttaatggctaagaa

SEQ ID NO: 4813 - DNA, 729 bp, Glycine max
ttttgtaggatctagttgcagattaggaagagaaatatccttcaaaagcaactacagaagaataagatatgcactagatatttaagaaacagcatactctatcagccttctttactttgtgaattgcttataaggggatttcttcattttcactagatcctcatccttcccctccccctggactgttgggactgctgttattgatttaaaaatagaatgagttttcatttctttaaccccgaagatattttggttttgatttcagttttctgcctcatggtgttgcactgtcactatgcctccttattcaaatcttccattatatacacaaatagtgtgatagaagtagagatagcacagggacctaagtgattaacgtccccattggacatctatgtttttgctttcttgttgaatatagaaaagtagaaaatattcaaaaagcttcatttgtcctcctatttctgttgtctggatgatattggaattttatggaagtccatcagggtttctgtatttaattaatcactataatgtcaaataagatttttttttgtcttttgcagtagtctgtttacaaactccaactggtttgcattccaagatgacagaattggtggtgcaactgggggaacatcatcggagatgatggatgagataaacttgaatggtgctgcaaatggtggcaacagtagtgatgatgaggttgtggttggagaggatgaaaaa

SEQ ID NO: 4814 - DNA, 638 bp, Glycine max
gcatgcctgcaggatttttttcgatcaatctcccatcaggcatatttttttgccaaggtttggcagtgttttctcagccgataaaattagagccgacacttttcggtcgaaacacaacctcggttaaattcgcacgaaaaaccctacccgacctcaagtctactatttatgggtgacatcagacaataaaactttctcaaccgtaaaaatatattatcgcccggcgtttgtaaaaattacaaaaacgttgcacaatgccggcggaaaaacaaccgttcttggtaaatgatttccggtgatgtttctcgaaaaatatcagtctggtgtatttgacgaccgatgtcgcctatggttgttttcctcaatccctgaataatcaatcggttaggaactattcggttaacgccatcatgtgattcttgttgggagaacttggatcagtcatctttctctgtaggattttttttctatcaatgtccttcaagcatatttttttgccgaggtttgctagagttttcttgggcgattaaattagagcagaccaatgtcggccgaaacacaacctccgttgagttcgcacgaaaaaccctaaccgaccttgaagcaaaatttatgggtgacatcagacaagaaaacat

SEQ ID NO: 4815 - DNA, 1403 bp, Glycine max
ttggtggcatccatgccaacaacacctaccctgctgatttcattgccatcaacctccaaatccagaccaatgtcatcgattctgcatatcgcaatggtgctaagaaactgttgtttttgggttcctcttgcatttaccccaaatttgcaccccaaccgattccggaagatgctttgcttactggacccttagagcccacaaatgaatggtatgccattgccaagattgctgggatcaaaatgtgccaggcttacagaattcagcataagtgggatgcaatttcgggaatgcccaccaacttatatggaccatatgacaattttcatcccgagaattcgcatgtgttacctgctctcatgagaaggtttcatgaggcaaaggtcaatggtgctaaggaggtggtggtgtggggcaccggaagtccattgagggagttcttgcacgttgacgatttggcagacgcggttgtcttcatgatggaaaagtatagcggactggagcatttgaatgtagggagtggaaaggaggttactattaaggaattggctgagttgatgaaggaagtggtgggatttgaaggggatcttgtttgggattctactaagcctgatgggactccaaggaagctgatggatagctccaaacttgcaagcctgggttggacaccaaaagtctcactcaaggatgggcttgctgatacctacaagtggtacttggagaacgtaaatctatgattcagatggttaagcagaatgtgccatgtcaaattttataggtacttgtcatttcacaacgaagaattttttgttaaaaaaataattatccagagaacagtacttgaccaatttttctgtaccaattatgtcatgtgcaatgaaaatttcagtgctttttttcgtgttttcaaaagatcatgagattaagaaccatttgttgaaaactatgaacagagtttttatttcacaaccatattaaaggctctatctcttgcgttagtagttttgtttcaaatatgcatttcctgcaccccgttattttcccgagagtctgggctttcggaaaacaatttatggatgtgcaggaagttttagcctcaaaccatcgacccagcatcaccatgttgttgtgggctttcatcttcatcactacaagccaccatccagtctgtttactgaatttcatgtttcgaatgtttttctttctatacatgaagggccctctaaggccactatgtttctcatgttaacaacatttatcatgacaacatctttcagagaaaaaacacaataaaagtaaagcatctggtgatgggagagcttcgagcgacagtttactgcatcaccactaaccaccatagccaccaccaaccaccatcttggtgggagagcttcaagcgatagttt

SEQ ID NO: 4816 - DNA, 798 bp, Glycine max
tcaaggaagtatttatcatgttggagataagaaaccccataaggggtagtattgccccagttactatggcagctagagtcccttggactaactctgggatttcaggcttgttaagataaacaaggtgaaggaatgagacttcgggaggtgaatgtgatactactggaggaagaacttcaggtccttcttctgatgttttcaagagatcaagtgtagtaggcatagcatttgatattctgaatgagtcatgactgctgtttcctgttccagatgatcccaagcttaaagattgagggaaaggaaaccactggcttgattgtcgttcagaatctacagagttttctaccctgccggagtcatctgtaccatctaactgcttgttaatttcttgcaatctaatgagctggctataagctccatctggatctttaatgagctccgcatgtgtacctaatcagttgaaagagataagaatacaataatgcttatgtgaaggaaaaatgatggcttgtctgagtgtgtaagagagaaaaacttcaaagcaaattgccataattggtttcatttatttggcagcataaaatatgtaccattttctactactcttccttgatgaataacagatatggtatcagcattccttattgtgttagggcggggggctacaatgatccggtggtcggtttatcataactttgtcctagtgtctcttgcaccactctctcagactcagcgtcaagggcacttgtagcttcatcaaagagcagactccttggatctttcagattgcccttgcta

SEQ ID NO: 4817 - DNA, 796 bp, Glycine max
tgagtttccaacactcaagtatggatctaattccttttcttttctttttatataaaaggaggttaacgtaattcttattgattcataagtttacttatggttgtgacatgattttatacagtgtgtgtgcatagtcataagtatcgcaagtacattaccacatctataacaatggcagaatttctttgccctacagattatcacatttgaaaccatgttcttttttgtgactggcctagccatgttctttttaatggattttacataatctttctccttatggaatcaagcaaagtttggtggtgtttggggaaccaatgaaaagtaaaagaaatatgcaaaatatagcttagagtaggaatcaagttttgatcttagaacctttttctttattcatcagtgactttttaactgttatgaaataagctgtatgagtttccatggatttaaatttcattcacttggtgcgatgagcatgttacatgtatgtatttgttttttttttttgaaatgcaaagataatctatattaataataagaagtaccagaggtactacaagatataaagggaagggatcctgtacgagcaggaactaaaacaaacaacaaacaacatgcccccaccctgccctacagtgaaaacattaattaaataaagactagaggcattgctgaagaccaacactggaaaggaaccttgaagtccctttcccatcccctcaaccagttcacatgaggaaaaaagagaatcagcagcttagggatatcaaagggttgattatgaaaaatcaattca

SEQ ID NO: 4818 - DNA, 744 bp, Glycine max
agtttccaatgagccaaaaattttgacttggctcaaaactactacaagtgcatagttgatattcaataaggattgcttccagcacgtgtttggtggttacacattcattaatcacaaagtggtcatagtttaaaactcaaacacataaaagaaaaaggaaaagacaaaggtttgccttttagagaaacaaaacaacttgcattaaccccatgcgcttccatcatccggaaacagaaaaacattaaacaatagcacaaacacaagggcccaaaagtggttcctaagggtacattcatagatgtttcctagaatattcagacaagtgtagattcatgaataagcaagggttctgaaactcacaaggacaaaacaaaaaggacaaacaacaactataacaagtcaaaaacacgtacaaaacaaaaaatgtttgatttgcacaagactgaaccataacagacaagggtcaacaactaaggacacatgtttacaccccacatgcgaaactaatagtgtttgaaagtagacatgtagtttgataaaaattagtgtctttttcacagagagggtgtatatacatgttctagcatgcaaagtcaaacctttaggcaaggataacctatcaacacacatacaccatttttatatttccaaacaacaaaggatcatatggaaatgcagttattttaagaatgcaagacactaaaaccctttacagttgagaacaaacctcagaatttcgacaat

SEQ ID NO: 4819 - DNA, 667 bp, Glycine max
taaaaccctccctatatggtggaaatctttgtcttgggtaaacatctcaggtgctttcctgcaaaactcgagcatcatctcctccaacatgctcatgggggatatgctagactaagggctcacagatggaagtgttggtggatagcattaacctggactatttggcagcacaggaatcagatagttttctcaaacgatagctttagtggtagcaaactgatggatgaggcaatcttcctatgttggtcatggtttaggaatatggaaaaaggttttgtaatgcattttaatcgatagtcgagtaatctaagagagggattttgtaatcaggggagggaagcatacataggacctgggtagcctatagcttacaatgtgaacagcttatggttagctaattcgactgatcaagttcgtattaggaaaacatatgtctgctgaactcgaaaaatttgtaatcttagtacccttagatttataatgtaatgtaactaacatagagctcaaatagttgtaaaaaattaagagatactgtatcaagaccaagtagacttcagtcaagaaagtgaatgcttctaattcaaagttcaatgtaaagataacaaatgagttgccttttgtttttcaacaatattgttagtgtatagagccattcctgtatcttcac

SEQ ID NO: 4820 - DNA, 793 bp, Glycine max
cttttcttgcatgcctgcagtgcctgtcttggaggaacaagaatcgcatcacatcaccccgttcccatataaaatttagcttaaatcattctttgcaacttgcaagagtataaagacacaatacacgtgtacttgtttaaaacagatcacgacaagtgaagtcaaacccaagtttgttcatgcacattgtttcccgtctctttctctgtttcaaacttaccatggatgctgtgtttctgttggttataccatatattcacccaaaagaaaaaatcgtataagagcatgtctaaagaattgtttactatagataaagaagagagtattaaaagtcacaactcactaggagtaagttaatggtggatgacctaggtagattacatgaagtcataagtgcattaccatcacagtaccaaatagaaaaaacaaatttttttgccacagtctagcataagaacttttgtttttcacaattctatttctgtaaactaatttacaaatgaagtctttgagatttataactttagtcatacttaatgatagatggtcatatttttatgaagcttatatgtcttgcataatttcatttagtgagaaaaaaattggattatatttgttgtaaattgtaattaaataatattaatgtgttatttatttccacttctctgttgtcaatcaaattgtaatgataaacagcatattaaaataagataccaattagttttgtcctcataacaggaaccctaatcatattctttttccctccattagcttataaaaaatgagagctaaa

SEQ ID NO: 4821 - DNA, 1506 bp, Glycine max
gcagggcagaagaggcctaagctggagagccagcatagtacaatggaagtatcagtcccacatggtaagaaaaggcccttaccgggacatactggtcccaagtcaaagaaaagtatgtctgggcatcttgaatatgcaaaacctgctgcaccagtgacttcatatgctatgttgatgaaattatgtgagaatgtactaaaccgattgatgtctcatcagtttggttgggtttttaacactccagttgatgttgttaaattgaacattccggattattttactgtcatcaagcatccaatggatttgggtactgtgaagaagagaataacctctggcgaatattcaaatcccatggattttgctgctgatgtgcggctgactttcgaaaatgcaatgttttataatccagctggcaatgatgtacacatcatggcagagacccttagtaaattttttgaaacaaggtggaaggccatagagaagaaaattcctgctattgatagtgtcgcatctgagccttcaagacctactcacgtggaaacagaaatttctgatcgagttcctcccacaaaaaagaagaaaataacaccaaatgacactaatgtcaagccagagcctgttaaaagaatcatgactgtagaagagaagcaaaagttgagtctagagttggagacaatgattggagagctgcctgatagcattagtgatttcttgagagagcaaagttataatgaagggcaaatcaatgatgatgaaattgagattgacattgatgctcttagtgatgatacccttattcaaactgcggaagcttcttgatgattacatgctggagaagcaaaaatcccaggcaaaagctggacaatgtgaaatggaggtcccccccctctctctctatatgtgtgtgtgtgttcgcgtgtgtgtaactaaatgactaatacaattgtccaattcatgtgatatttttgtgacactccatgtcaaatttgagataaattatatatttttaagtatttaattgaatagtttatatggaaatttatattaaaagcatatgatacattaacaaaaggtagatcaactaatttgtaaataacaccaaattataggatcttgaactgccttatgataacattcaatcttaccattgaatttatgaaatttgatattcaaaaaattatccatggagtgtgttaagagtcttacacaggataagtggttccctgattatacaatgtgtgtgtgtgtgtgtgtatactaaactattaatatgtgcatgtctatgaaccctctatggtgtgtgtatcagtttaattgacatttttgcttgcttaatttttatgcagcttctgaatgaatcagggttcagcaattcatcaatgcaaccttgcaaaggtatattctgtttcttttgctagactgctagtatgtttgtttgtatccttactgtatattgtataaataattgacactaagtgaggtcctttatttctcactgcaggcatg

SEQ ID NO: 4822 - DNA, 1393 bp, Glycine max
aatcacacacttcttgcgggttatctggtttaacttttatttttaccggattcccaatctttgatttatcttccattctagcaatttctaaagcttttgtacaaactggaaaactctgatcatcccagaactccaaaatcacaccagaacctatgcatgttcttccctcatagaatgccgcaaactgcccagctgctaggccttgatcatcttcagatatgcggacaacagcagagtgacattggccatcagcttcgacttccatttgtaagctacaatcataaaatccaggaccatgtctcacctgaaaaggttaagataccattagtaatttactatgagtactacaaaaaaatggaaaacgtttttaataacagggaagagaatttgatattcaagtaatccaccttgcattggagctgagttgtctggcctgggggcaacccgctaagccatttaaaagagccaacacggaatacacgccttcttttgtcaaaggaaaagtaatttcttgacacaaaaactacattgtttttaacatccttctcaacaacatacctgcataagataaaaaaaaatgggatgaatttctttcttgtttttttaatccaagtccaaatttgacatctggataggaatgcattgaaataatattttgaaatgactcaaggtggagaaaataattaagggaaaaaatgctcccttccaagtgaatggtcaaaaaatttgtacaacgcagattgtattcataatctcatatttctgcacctacaacgtggatatatattcaatacaaaaaggattgtataattacatgattggaaacttgtaagacaaatacaactaacgtcaaaaagataacaaaccatgggcctccaggtagtcgtagaccctggcgctgaccaatagtataaaaccaaaatcctcgatgtttgccaaggaaatctcctgtctcagcttctagtatgacaccttctctctccccaatatgtcttgcaacaaattcactgaatcttatctataactcaaaaagggaacagagatagaaacagaaaagaaatcaaacttcaagacttgcttccaaacagtaaacaataatatggcaccattaatattttaaaatagaaaagtcaagaatggttacaataattcataatgtacactgccataagtgtcatttttattttattcttccacttttagaaccatctgaaagttcaaaagtgatttgtaaagacttctcatcaccatgaaatagatatgatgtaaaggagctgctcactccacataccttgcccaaaaagcatattccttgggaatcctttctatccttatttggtagatcaaattttgtggcaagctgcggattcatactgcaggcagcaagtcatgg

SEQ ID NO: 4823 - DNA, 1301 bp, Glycine max
catggaggtgtagttttgagtttgcaaagaaaggattttctggttctttttccagtagtattgctctggcaacagtgtgagctatctgagcactttctttcatcacatctcctaattgaccagtggggtgcagtgttccttttccctccccttcttcaacaagtgtggtctctatatacagtgtggaaccacccattgcagtccaagcaagacccataacaacaccaacgggtgtctgatcatagatgcgctcagcatggaagacaggcttgccaacaaagtcagttaaattagactcatcaaccaatactttttctatagtctttgttttaatttccttatcttcctcgctttcttttgcaacctgccaaaattaggatccatatatattaatatatatcaaataaatgaaccagtggcaattggacgacaaaaaaaaattatcaggtttcacagggaaaaaaatcaaactaccaactttgtgtataaaattttttaccagttaaaaacttttgaacaaaaccacaaggtttcactgtggtcaaagaagagcaggtaaaacactaaaatgcatgtaaatagctcttatatatcaaagaaaagatcgttttttataaaagaaagtatttgattgtactttcagggagctaacttacctggaggcattgagattcatcagatgatagatctgtttgcaccttgtcaactttatcagaggtttcaccctctttttcaggatcactaccctccaccaactcggagttcttattttgaactgtattttgacccaattcatcagagtctatattttcttttattggttccacggtagcatcaatcatttccccttgcctcacgagttgtagcgctatctgccattccacaaacagaacattttttgtcacagctaactgaatcatttactattcaaattcagatatagtgatgaaataatgcagccaaaactattgaaaacatcaaatcatgagtggttgtcttttcaaccatatacaacatagccttttcactgtcagtaactaaaagttgactgtattgacctaaaaaaacaaattaacagacctttcggtaaattttttctatgtgcttttgaagattcctgacccctgcttctcggcagtagttttctattagggcaagaatagcagcatcagtcacttccacctaaagcaggatagtttttaaagtcaatattttcagcaagaaaggcaaaaaaagctggcatcattatgcttgcaataacactatgttaagactttgaacatcccattctgctgcaggca

SEQ ID NO: 4824 - DNA, 815 bp, Glycine max
acacatagtgacaggagtgatagggtcaggagtgttgtctttggcatggagcattgcacagcttggatggattggagggccactcactattgttttctttgctgccatcactctcctctcttctttccttcttagcaacacatatcgttctccagaccctgaacttggccctcataggagctcctcataccttgatgctgttaatttgcataagggtaagttcttacaatttcaatttcaacagcaccaacatgattcatatcgtgttatatttgttttgtttgttagtactatttccatgtacatgttatctgtttggatcacttcaatttgtgcgtgatctgataagataaagtggaggaaatcatggatgaagtttcttttcttgttgccttatattaacaaataaaattgtggtgaatgtgatggtgataagggaaaacgtggctttgacttggaccaatggtaacgtgagtgagtgtgatgtgtcccgtatctaactagttcagttgtgtcacggcaaccatatcctctgcttctgttgtgtgcagattgagatcacaatcgatccttttgaatgcttccacatggatcttgctcattacactttcatcattctctctctcttcattaggccacacggaaccacataaaaaagatagagaaatcattcactgcttgaaagtgatattcatttttcttaatattttacttggctctaccaataatatatattcagtatctcttatacagatatttcccttaagatttaattggtatcgcacgtatataaaatatatttgaagtataagcct

SEQ ID NO: 4825 - DNA, 744 bp, Glycine max
cacaaatacacatagcaggccaaattaatgacattaatctttagccatattggtatagtgagattccaggaacaacttcatatattcctggtggagtacaagtgataaatcttgtttgcaaatagtagtattccatggatgaatgtagggaaagtagagcaaagataagaaaataacaaaacgagagaaaccagtgtgataagttactgaactcacctcatgctgatagcagcagtaatgacataagcaattccaaaaccatataagcttacgttcacaaaaacagcacagaagcgactattcccttcccctgcaatgtaaccatccaattaggatcatccgtagagcagttttgccactagaaacatatcaagatgctgttccaaatatgctagcatatttgatcaaaattgatataaaaaacttactagatgaaattttaacacttggtaaactgacactaatacatgttaagcttcaatgctatgaaaggaaagaagccaaaagaactatgttcactaattaaagagtaacttctaacctaccatagctccgcacaactatcaatatcaccatggctcatctgccattgctttcattatcaccaccaccatcaccatgatgcctttcacccgacctctcattaatcataactacaatgttaaccttgtgaggatatatctcagtattaaattagtaaaggtaacttgtataattctcttaaatttttaactcacatcaaca

SEQ ID NO: 4826 - DNA, 794 bp, Glycine max
ttcatggcaaagcaggagaaatataattcaaaacttgctgagatgttccagaaagtggaagatcacgagtcaggtgaccaaagatcatgcaacatgtccaattcaagtgtgtgtgatggtagtcaaatgtctcccacatctgtaacttctgtaaccacagatcttgggttaggaatatgctcttctcctaccagcaataaattgaagaaacccgctgttcaatatacaatggagcctccaaaggaaatcccaagtcgattttctcaaaacaataatgtggctgatgggaatatgttgaagcatccatcacagtcttcatcctgcttaagttttgactattgtggacaagttgatgcaaaaaatcccaaaattctttttgaagctctttccaaggaggtatgctggcaagatgaagctttacgggctatcgtcaaaacaattgtttgcagccctacaaagagggttaaacaccgtggaccaaatcagcctggggacatctggatgaattttgttggatctgatagacttggtaaaaagaaaattgctgtttctctagctgagctattatacggtagccgggagagctttatttttgtggatctaagttctgaagaaatgaaaggatgcaatgtgaaattcagagggaagactacccttgattttattgtagggggagtgttgcaagaaacccttgtctgtgtttttccttgaaaatgtagaccaggcagatattctagctcaaaataagtttgtgtcaagccctcaagacaggaaaaattacagactcgcatgga

SEQ ID NO: 4827 - DNA, 867 bp, Glycine max
tgcatgcctgcagttgctgattcatgttaagcactggatcatcacttgaacaataatgagagttatgcatgctatccagtttatcactagacaggtcactgcaaaagcttttgttttgttccttaggcgtggtgcttgacacactgggaacttgatcttgcacactagatctcaaaccagtagaagacccctctctggccaaggtacattgaggtaagttaattctagatgccaattcttgcagctttttgtccaacaggacacttaaagcatcactatctatcataggttgccctggcggagataatgataattttttgggataaagattatcactatgcccaagagagttgacatcaattctatttctggttcccatcacttgctcggtagaggatgatgactcaggcatagttctcctcaagggagatgtaaatgtaaatgaaataacatccttgctttctatcatgttaaatgcatcctgatcaaaacttccatccgtcgtaaaattgcatttaatggacttacttccaaaattatttactgcattatcaggacctcttccctcatgaacatctttgctaatctttttcttctgggaaatactcactgttttggatcttgaaaactgcttttggttgtcagttgccctagtgcttgaccttttaggttgaatatttgcagttatagtacccttgttcgttgtcttccttattccagaaagttctgaagataagctcgtgttgttagcttattagatctattttttgaagttgattacccttggcagcatgctattttgcttttgattggtctggccaacacattgcttttccggcttgagcaagcccttgctgcatagttttt

SEQ ID NO: 4828 - DNA, 698 bp, Glycine max
aatcagttactatggcttgggcagagttcatcatagggtaactatgataagcaaccaacaatatgacttctcttatttattcttttgatattttctatgtaagttcactgtgagagaaagtaaagaatgatgtcactgatattgttgttcttagcagtaattcagacttctatttaacaaaatatgttacttgtcgacaatgctttttgaaagcattttagggatatataaaaaaacaattcatttattagagtttcataaaaatggaagttacatattttttataattacaacttccatgtgttcacaaaagtgtttaaaggcatgttttattttttaaaaaatgctaaaaataagagaactttaactcaaaaaatgaatgatattccatttaaaatcaaaatctatcattttgtgtaataatattctattattacctatacatatgacctgattattgataaataattttattaaataggtaatcataaaattatagatttgtgcatacaaatatcatatgttgaggaaaataatctttttaagtagatattagtattttaataaattagtctttgattttcatgtaagaaatactgagttaaaaaaaataaaaaatcaaccacctgatagtcctggcacttgaagtcattttgtgatgaaaattgtatcctgacactaattaagtaaaagggatg

SEQ ID NO: 4829 - DNA, 794 bp, Glycine max
tctgctgtctcaaatgtacctagccacacccttctcttcctgtccattaataaaaatctcagttaatataaactttattcaattaactgatattgatccatagatactataaatattatataggtcctatattaaggctttaatgtaacatgcatattaagagaatgatctaaacaaaggtccaacaagttgtttgttaaaaagaactcattatgattttctttaagtaggtcttgattgagtattatgaataaaaacaaatataatatcagatttaattagattctcttatatatattaatcatcaataaaattgataaatattttaaactaatatcaacatgactcaaattatattaagaaaatggttcattaatcgtatatgtgaatcttaaaccaaaaggtgcctcttaaacatcatgtttgagatatagaagttttaactattagctttttattagacgcaaaaaactatgactgagacgtgaaaccaaacacactaattaactaacaattccttttctaacaaggccaaaactaacaactaattaactattactacatgaattgtgtatgtgagattgattatgaaaatagaaacataactaactacataaggtaatattataaactatggtgtttcatgaggtaattacagcaaggggtgacgaatttctgagacccatgagccccattggcgctgtcttactcccctgaacttcttttgctgtaccatattgatgatggctttgtgcggtgggtgtttctgcttgagcaaatgaacggtttttggt

SEQ ID NO: 4830 - DNA, 771 bp, Glycine max
aaatggatggaaattattgggcaggcacatcaaaatgttgattttttgaaggatcaggatgtaatccggacagtgcttaatataatgcaggtataactttgaaatcgatttatatgtttttactttttgtgtcactgctgtatattgtctagtattttaaactctatgctattaagccatttgaatttaagaagttaatttttctcccaatttcagacgaatacaagtgttgcaacttctttagggacatatttcttgccccaaatctcgttgatctttttggacatgttgaatgtgtacaggtatgttctgttaactatagttcttatattccgggacactaataacataattgatactcagcaataaatagtttgatttgattatttactaaatgctaaataattttttttgctgcaacagaatgtacagtgagcttatttcaaaaagtattacagaaggtggaccttttgcatctagaacatcctacgtcaaacttctacggtaagattaatcaaggatatgttggttttgtacaaatgagattactatccactccactctttagccatgtttatcttgatgcagttcggttaagagggagacacttaagctgattgagacattcttggataaggcagaagaccagccacaaattggtaaacaatttgtgccgccatgatggatcctgttcttggagatatgccaggaatgttcctgatgcaggggatcagaggttttgtcactttttgcaacaattgaaacaagtat

SEQ ID NO: 4831 - DNA, 703 bp, Glycine max
ttctgcctgcacttgaattttagaaccattcatgtcaaaattcatgttttattattattttttaaatgtgaacaaataggtgaatcaatgtattcttgttttgttaccctgtattttttttttcaatacataatcttgagcaatgaattttatttttattgctttcttgttcttgatctgaacttgtaaaattgaccttaagatcttttgggaaactcctcttttttcccttcatcgtacggataacatgtcaattacaagttcatgtttaatcaagggtcgtcttcagttacttaaaactataccaaaattctggtcaagtaacccctgaactagttttaagggataaaatttgtccacttattatccctaaatctagatggtagaggcagtttgcctgttgtaagtagtcaaggagaaaaagtaatttattttatgaacgaaagggaaaattgtagcttactcagttctcatcgttgcctgaaatagaaaagatatttagacttaaaagtttgatgtaacttgttactccatatttctatgcattgatctcaccacaacaagtgaggctaactctttatagtataaccatataacagccatatacattattattaaagtagttttattctatactgtactgtttctgtgtacagcagtagtcttgtaagactttttgccagctattatctctaactaactg

SEQ ID NO: 4832 - DNA, 794 bp, Glycine max
aatcagtgaatcacagtacttttttggcattgggggtggttgccaattgtccaatatgattttgctctgtatgtgaggtctctccaatggccaaaggacatccttagtcagaccatgcctggggcctccagggttccaacattggaaaaccccaagctcacagaagcagatccccaacaaatgagtccctcatctctaaccttgtaacactttgccagacacaatctgcttcagcatcagaatgctggtggaatgttcatagaatgagccatttatttagtttggccaccaagatgtcacttgcatccttcatctcaatgtgtggtctggtttcaaccaagagctttgcccatgctagacaacactgaggacgaatctcagctaccaattgaagcaataataaattcaatggcaatgacttgatgctgtataggtacaccacatctcacatggtctatacctcagatgccatcatgtttttatctccactgcatgccaattctcatcttgcattattctttgggtaaaatttcaccttgtatttgacattgtgcaggaatcaagaaaatgttggagtatgaaattggagcctgaaggaggttggctgttggttttatatgcatgttatgccatgcttcgtattggcttctttactcgaaatttgcatctatgttatgctagaactaatttgaaaatttgcaacttctctatttccaacattcctgtcaatttaagctgtaggatgttctgaagttgtatgtaatagtgggatggaacttgattttaataatgat

SEQ ID NO: 4833 - DNA, 793 bp, Glycine max
aaccgacagaaatgactgtaccacaatgagatttgagacccaattcacagtagcagacatgcctccacatattcctcggtattcttcagggtatacttctgagttaactgtccaaggcacaggtcccatccctggggagaagaaagcaatgtacagggccaaaccaagaattgcaagccatccatacaaaccactttcagatgattggttaaaaaatgacaaggccaagatgatcagagatgctattaccccccctaagctatatagggccaattttctccgtcctgcatggtcaataaggtaaatgccaagaaccgatccggcagcattcatgccggcaactatgagagaaaggagaagagccaactcattagattgaaagccagccatttggacaattgttgggctgtagtacatcactgtgtttatgcctatgaattgctgaaaagcctgtacaaccatgggatgatataattaacacatttccttttgcatgtttaaaaaatacagaacataatccctcaatatgtttcaaaattgagttatggcttgatcactgatatattgtattcaaaactgccagcaagcaaagaataatgcaaccacaaagatgacacgtgatattttctctcacatcaaacaaaccatacatcacacatcatgcaatgagactgaagattttattttatcagtcacacaggacaataagctgaaagctgaacatttagcatttaagaaagaaaaaaaatttatttgtgttaaaccaatctcaatctgagctcaaacaaataaa

SEQ ID NO: 4834 - DNA, 831 bp, Glycine max
agactagtttggagatgaacaagaaggattatagaaggtgtcaatcggatattattgtaaagcgcgtggagactgagaagcttcctccgcgcgtgttgcagaggtgtgagactcagaaagtgcaggttaacaataataattcgtaccctgaagatggcatgagcaacgatgactttcgtcgcaaggttgaggctttcattgctcgccaacagaggctacgaactactcaactctctaattaattaattgctagaactatgagtattggtcaaaaactcatatgtctctatattattgcttctactattggggtcaaactggaaaaaactatatatacatgcaatgttattgcttcggtttaattaataaacaaacaaaatactatgtgatgtatagatattatatgcaagtagagcttaaatgaaagttaaagaatttaagtagattggtcagagttttatagacttaatataaataacaaaataaataataataaaatatctataaataatataataattaaacatttcaataatataataaaaaaatagtaaataataaattttacaatatttaaataaccaagtctagtaatgcattattactagataataatttataaatacagattattttcatcgagaatataatattattagagaataagagtttgatgttattaaatatgagaaacttttgtatttgagacacactaaatgttgaattttaaatagattaaaaaaatatccaaaatgacttacattttggtttaaatttttttatttggtgactcgatcataaactggagagtctaccgagtttataaattta

SEQ ID NO: 4835 - DNA, 1435 bp, Glycine max
aaagataataaagagagaaatagagagaagtaaaggtaactcctaaaagctagtcactgtactgtatgagagacatccaatccctttgcatatttgaaaggctaaactatgtttttcgttcgtataaaattaacataagttcagttttcatcttgtaaaattttttgttcatttttcgtcgttgcaaaattaaaatgtgattttttggctctgacctaggtttggatccaaccctatgcaaacctacatggccttttttaaaatgttaaaatgcaatttcgggggattaaaattgtcacaaattgcagaataaaaataaaataaaaaataaaacacgattttttagggttaaaaactgccacaaattacaggaaaaaattaaaaaaacaaaaaacccctttctcctaaacccaggtcggactcctaatcaaactatgaggaacccaagcaataccactttcctaactataaatttttattggcttctcaaaagggtggcaattctgaaacaaaacccatgtaatttcaaatggtccatgtaataaaacaagttttttcaacatcaaaactaaaacaaagtattgtcagaacagttgtgaaacaaaaacggatccttccatacaagttttttcaaatggtccgtgaaacaaaaccattgtcaacatgctcaaaaccaacatacactcttgtgcatcataaacatctcccccctattacaagatccaatacaagcataatgcaaacacaaatggatctctctaactccaccacaagggtagtgggcgaaacgaggtcttgtaaatttaaaccgtttgtgtcgtcggtggaggagaaaatggacctgacatcgttgtccacgcaacctcctccacattttttttttttgatcagcaaagataatatatatatatatatgaatataaaccaagtaccagaggtaccatgattacagaagaatccagtgggatggttcccaagacagactacataacagtctcggagggaaccaaactggaagatagataaatacagctactgctacactataaattctaccctcaactaagaacaaaagcatctctaaggttagaggaccatagattatagtgaattgtgaaatctttctcaaaacttctaagccatgaccacagtaagaataaagcatcctccaacagtttgtttccatcaaaggtgccatttgagaatatgatcttgttcctcaactgccaaacgttccaagtaaaagccacccaccataccctccatctattaccccgaattccatccacccaatcaatcatatgttgggagaaattttgccttgggtgctgagggaacacactaagcatgttcacccaagacagagcttccccccatatcggtgtattctgctgcaggtcgatccagagggataccccgggtcaccgagatgcga

SEQ ID NO: 4836 - DNA, 813 bp, Glycine max
tagaaggaagaaactgtcactaatctttgtagttaaaatgtaatatatgttttgaaagtgacttacctttctgtttatttttaacatcaggagaggaagtagaagccttaggtatgggctgatggggctcgtctatttcaatgtcatctgtgccaaaatatagcatgttttgaggctttgttttttaaagttcaaacttcatagtgtgaaagtattcaaattataaaaacttaaaaacactaaatgtttaaagaaaaatgtaaacctatatcaagctccgcttctttcttatctgggattgccactgttgtaggggaatcaggcaaggggggcttaaagaaaatgtcttccaaatgaccaaaattggaggttggaattttagtcacatctgttggagtggtttttcctcctttaaaccctttgacaataccacctagaatccccggcaccacggtctgtgccaaaacagttaagctaatcaaacagcttttcaatggtgggaacattaggatgacaaataaggcaaatcagagaacctcatacctgttttttcttctgatttgaagagaatctaaaggcagcatcagcagcggctgcaagaactttatcgtgaagacaaggcagatgctccagattactaatacagaatagaattgttattcaactttttcttccttaatttctacagtttaaccagatgtccacaatgttatctcttcattacaggataacaaatatacctgaattcatctttgccagccagtaatgacatgaatgctaattcagaactgttagccctgtaagtatgaatat

SEQ ID NO: 4837 - DNA, 802 bp, Glycine max
tgtcctgcagtatcatattattatatcattgatattgttaacatttctctttagaagcttcacgaaaagctttatgaatgagtctctcatcatcgtctgctcatttcttttggaaggagactttcatttacgccctcaatattccagatctgttcatgtttttatcttttgtttttgtctctccttcacttcactcattctgaaaggaggctttcacttcctcagttcgtgcttatcatttgctacttctcttccttcttctcaacttctttttttactcaaatccgactgaacgcacccaaacttatccgcaacctgcctaatccgaaactactcaacctgaagagtttcacggtcaggaatgggtgatataaaaactatttcggtttgcttcgtgtgggtcattttaggcccaaacccgtccgaatccaaccgatgctcacccctagtttacacccttgaacccaatatgcatgtcctatacaaagacagcggaacatcaataggtgggatttattagcattccctcctatttctgcttgtttgttgctcaagtttccatatttttcacaagttgaaaccttagtttagattatcataagatttgctatagtgacataaattaattctgacagacaaaaaatatcattatagactatagagcctatactttggttaataatgtatataatagggaaaagttccattaagccttagttgggaaaatttcaaagtttacaaatctccaatattctacaccatcaactcatggagaattggatgaaatggctaaagtatgact

SEQ ID NO: 4838 - DNA, 868 bp, Glycine max
acttgctgcctgcagttgcctcatagcaaggaacttacttcctggtctgaagacttgtatggaaatagctagttacatgcattctggaggagtgtcaatgccccacggatctattgttgctcctagttcaatcatggaagaaattggaaaatttgatgctgactgcacagtgagaattacaacctcttctgtttccatcttctttatcctacattcttgtgtcttgatgtctttctgttattttctttttggaggtgaggggaggattggtaaagctaaaataaaattttccatatgtaatataccagatggccccacctgtttggataagttgtgattttgtattatctcaataggttatgaccaattttttatttttaagaaattatataaccaacatcattatattctgaagaattgatatttctatagtctagttgggcatcaaacttaattaaaatattaataatctttaattataggaaattttctagcttttttatttggctgcctaataaataggacgtttctgggttgaacatgtaaagagattgagttactcttgagttgataaatgttcttttcttctttattacctccgtcatgatactctgttttgtatgagttcttcattttattttaacaagaaaacatcattttgaattttaagctagctgcactcaaatttattatcaaatctttgttccgacaacttctaccaacctttatgagtaccccctactttagaaacaaaaaaaattccttttcatctgggtttttcattttagaccaggagatgccatctaagtcaccggttgctgaggaaaagggccaaacaaggaaaatttaatttttttggaaatttgct

SEQ ID NO: 4839 - DNA, 841 bp, Glycine max
ttttttttattttaaatttcacattaatgttacatatgaagcttacaaacctccatggttatctaccttgaatagttcatagccataaaactatttccttttttctgtctaagaggtcataaatgagcctccatgttacagtggcacatataatgcgacgctttcacgatcaagagtcagagttaaatgatgttgcactcatttcgcgctcacctcatccattgatcttgcaagcctatgtcgtctgtcacaaacgatgctttggaaaaggttttagataaatgagtttatgcgaagtgttttaaggttaggaaattttgggaaaacaagtggcatgacaataccaactactttttgccttctttttcattatttgtttttaattaaactacattatttagtcaacaataaaaaaaaatgagagatataaagaggattgaatggtcaaaagaaaaaaaaataactctcttctcacccgtgaccgattatcattggatcaagatcaacctaataaattattaatggacgttcatgatccattctatatttaacaaaatttaaataatttaataatatgtaaacttgtacacttgtaatttaagatttaattaaatttaatatatttataagcatagttatgaccttgtttaaaattttgaacatacaacatatttttgtagaattcaatatatataaacaatcttaatttagaatttaaaatatatatttattagtgtacaataacaaattttatctaatacacacataaaaattagtcaagagaaaattgaagatgataaccactttaacggctcaatatttagaattggttatgcttgat

SEQ ID NO: 4840 - DNA, 857 bp, Glycine max
  misc_feature (827)..(827): n is a, c, g, or t
acaacccagatgaacgcattggcattagagaagctgttcgtcaactaaaagctgctagggactctctttcgaatcagtctgatgagagtcctacacttactagtactagagatacctagtcttacgtccatgtttcagcaaagtgaactgtgtagagataggaaagagtcagagagagttggcaccgtacgatcctttacactttgcagccatgtttgacaaataagcgcaaagaatatataatataataatacttttgttgaccatgtaatgatccaatactttactattttaggccaatgaatcgctctagtcatgtatggtagaaattgagatgtatttctgccgccaacctttaaataggctattaataacagagaaatataaggaggagtgtgcttaaaagagtgtgattaagagtgtgacccatttttggtccatgaaaaaaagcaacaattgatatccaacacatttataattggttatgcataataaacaagttatttattttactctcaaattgctctagaggtgcatgatccctacagtttaaaggtaaataaagatggaacaacagttatttaacaaagcatataagaattcagaattatcactaatcacttgcagtgtccttgttaacaacttggattgggtgtcgtttaagtgcataccggacaaaaataacccatctcacatatttgtgtctggtatgcaaccagactacacgacctaaatagtagtgtagcacaatttattattataccatttgtgtcccggtatgcaaccagactatacgacctaataagtagctttacactattattatnacgaatgaaaaaatagcttatacattgcca

SEQ ID NO: 4841 - DNA, 1589 bp, Glycine max
acccgggggatacctcttggatcgacctgcagcaacaacagccttattgttctaggcaaagttgctcaatattagcagttttttagcagcgcaactcaaagtaactccccccaatcgattggtctggcctaggaaattgctagaaataaactttgtgcaactgttttgttcccctcctccaatttggtgaaactcataaggacaaaagtgatcatcagcaagataccatagagaaaaaagataaactaagaaattgaagaatgcatatttgtatgctggcaagcgtgaaaagggtatgtaattaattagaagccaatagtatatgactaaagtagatatgatttatatttctccatgaaataaaatgtattgatgattggtcaatagcgtgcgttttagctaggtagaggcagcgatcatattatatgggtagcaagaaaaattgaagagtgagacttagtgagcacgaggggaaggcgcggttgagttgatggaagtgggtgtggggcattggtaacatttggtgaagaaaccgaatgtgtcaatctggtgtatgaagttgaccatactcgcccatcctccgaatccaaagcctaccactagaacccacaccaccacaaatacgttcatggtgtacgcacccacccatcttcccaccgacctcggaggttgctccaccgcattctgcattattatattgcaatccatccatcaacaatcaaatcatgcatgcatgctttacttattttcaatgggaaattaaatagtactgcgcgctacatttctttgtaattaattatttcgaatttacatgctttctttatattactgttgtactacaatattataatactacagaattaatttacgcacaaataaagtttctcttgataaaagcaacaattcatgcataatagttaagtgttaaaatctgctcagaataacaaatggaagagtaaattgtaacagtgctactcaatcagacttggattctgactagtttcagagatggcccacatgcatgcatactttatttttctcgaactgttctagctttctttgtaaatagttaaaattaaaattgggttgaatgaattgaatatagtacgtacccgtcgggcagcgggtgatttgaaggtgaacatgtgggcgagggcggggatgatgtaaacggtgaagctgacaagaagagatccaacggtggagttgatgggaccaaagaaggggaaaactatggccaaaaaccatattgggatcaccactggcaatctcgccaatgcacgcttgcacaggctcctacactcgtgtatccctattgctttctcccacaccaaatatagtggcgtgcttgcaaacccaaatgttataaactgcaatgcaattttccaattttcaattacaatataagtgatgtatacaccaaaaatgaaaaaatactagatatatatatggatagtgaaacatgcagttagtacgtatgtacctggtggatgagcattagaatgacagccatgtcacggaagggtgaccttggaagcagagaaaaagcattggagtgatttagaagcatgtctccaaatgcccagtat

SEQ ID NO: 4842 - DNA, 809 bp, Glycine max
tacttgctgcctgcagttcttttctctggactggtaaaagctgtgttatgaagaaaagtcccgtggcgtggaataaggtatgtgctccaaaaattcaaggtggtttgaatgtgataaatttccaaagttggaacaaggcgtgcttaatcaaactactttggaatctgtataagaaagaagatagcttgtggattcaatgggttcatacatactacactagaggagaagacattatgacattgccgataaaagcgtcctgctcttggattatgaaaggaattctaaagcagagggtgaaagtgcaagagatggctcaatggacagatttgctccagaccaacagatttcgcgtcaaccagttttactatgggctgttggagccccaaccgatggtatcttggaggaaagtattttttaacaatgaagctcggcctagagccttgtttattctatggctagcttgtcataacagattggtcacgaaagaaaggttgtataggtttggtattgtgaatgatgcccggtgtgcgttctgtgaaaaggttgaaatggttcaacatcttctgtttgaatgcggggaaatgtatgctatttggaaaaaggtgctggattgattaaatgttgatcatgaacccgcagggtggggttgcaagagttagattggatagaggatatgagcaaaggaaagaattggaagagtcgtttcctaaaaacaacttttgcggaaaccgtgtatagatgttggaaggtttagaaataataaattcatgaaaaagttgacacgacagatttagctgatgaaattatag

SEQ ID NO: 4843 - DNA, 792 bp, Glycine max
gaatccatttccagcagccctccaaaacaacgtacccttttcattccacaccttccactatagcctgtaactcatgagataattcttcttctcatgcaaagagacctcttcctaccatccacccacactgccaaattacttatcaaagcatctttgctcccaagactaaacaacctagggaatctatccttcaagtctttaacaaaccaccctccacccaaccatccttccaaaacaacgtacccttttcattccacacctttctacacaaagaccgcttaaaccactcacctttagccccaaaaaccccttcatgcatccaaccttcctaacatcttccaccaggatgagcccctcccttcgcctaccgccccaccattaatcccatacagagtatagtccgattaaggttgaaaatcaatgctttgcacacaagctattggttgtctttgtttaaagttttaaggttaaaatcataatcaaatttaattgcataggcaaatcaaatactcacacaaggtcttaaatcaatatattaaattaagactttaacccaattgcatgtaatttgattgaaaactaaaggttgctaacttgactaaaaagaaaccataaatgttttttgactagataagtggttttttttttttttgaaaaaagaaatataaatttatattccaaaaaactatgaagtacagaacgaccccctagggtccagtttaaaaaaaacaaagaaaaccaaacctatatcataaggaggtgagcaatttgctctctaaaattctttttcat

SEQ ID NO: 4844 - DNA, 1365 bp, Glycine max
agtataccattcggactcggtacccggggttcctctaaatcgacctgcagtgcccgcgacggggcgagagttgtcgaatcctccatcggacggcatcaccaatcttcgattctccaatcacagcgatcatctgttggtgtcctcatgggacaaggtatgtatcatatgctcctctttctccgttttcatttacttgctatctattccattgattggtgtgatgatggttctattcagagtgtccggttgtatgatgcgagtgcaaatgtgttgagaggagagtttatgcacgctggtcccgtcctcgattgttgcttccacgatgattcctccggcttcagtgtcgccgccgacaacactgttagaaggtcacttaccctactcactctcttcttcaatttcaaacctacctgcttgtcttgttcttcaccctgtgacctagttgtgttgttctttgtacctggataactaaattacactcttctccttcatatatccttaaaattacattttctttccttttaacttatcaagttactttgtttgcggatggattaatgagctatactgctctcaatatcattggttagtttagatttgaatccctactgttggatttaatacttcagaagatgaagtgtaaattatgagttatggctgtttaaaccatgatttatattgtgaaagtccaaaattcaatagcatgatgttcaaagttgactgcccatgacattggaaattacattgtctttcctttttattaaaaaatttggtattttttttttctcaagagattaatatgcttcacactttatttcgtcttagtgtgaagaaatcttctccttttgtgactctccttaccattagttagttttgaattccaactatccgttttgggacttaagaaaataagatgaaggttatgagttaagttcctaccccaaaattatgtgtatttaaaacgacattttatcttctaaattccaaaatttgatagtgcaaagtccaaaattaattgtcggtgacattagaagttgcagcaagaaaaaatgcccctttatagaggcttgcttatcgttgctggttacatcttagagagattagttaacatttagaatggataaaatgtaacacaattcatctctatggaaagggaaatgttatttttaaaataacgggagagaaagtgtaatttaagcatttctgagtggaggagagggcatttatctctgagtggaggggagagtaattaaccctttatattatcatgctccaggcttgtcttcagctctaacaaagaggatattctaggaaggcatgatgcacctgttcgttgtgttgagtactcatatgctgcaggcatgc

SEQ ID NO: 4845 - DNA, 1489 bp, Glycine max
acttgcatgcctgcagctgcaccagatgatattcccacctgcgatatatttataatacaaacagaatagcattaaaaatgctgcctcctcccaaccacacccatggtatctccaaagtacagttcaaatcatgcaactaaaaaaaagatgatgcacataaacaaagccaagtcacgagaagaggtagcccattgacaaacccataatctcttttcaggtgaacttaccagcaaaccttctttcaaagcaagaagtttagcagtttcaatggcttcttcacttgaaatctaaaatcacaaacaaacataagagaacttttagaatgcatggataaattatcatgattcttggttagtgatgtctcctcccataaaagtgatttaataaacttctagccttcaagttcaagttccattacaacaagtagagagaggaaagtgataatagaacagattgcatactcaagctaataaaaattaatttctccttaaaataattcaaaatttattcacagcagtttagatgacacttaatagtgcactagaattgaaattttgatttttttatacagtctagattacatgttttgcatgcgtgcaaagtacagaattggattttttaaagaatgaatacattaggtgcacgaatggaggcacaccatattatcatacaaaccaaaaaataatctctttatttaagcaaaaataaacttatcaaaaagttttgtggcttacttgaacaacttcatcaagtaaatcgacatccagaacaccagggatgaagccagcaccaattcctttggatcttatgagggccttatatccatttaacaaccatgcatttgtcaggagaaaggtacacaacaggaggcaggcatttgataaacgtacacaaaagcacacacgaattctcattaagaacgtgcaggaataatatcaccagtgcaataatggtaaatgacaaagcacatattccttaaaatacaggaaattgaattcaacaacagtttccgtaagtatgagaaaccaaatgatcttgtaaaatgaattttatatacccttgaataataccaactttgttttatatcattggattctccaagaaaatttcagagcatggagaaagaggagagacaacaaacttgacagacaatgggagatctgatggcagcgccttcaaggtaaaaagatgttcagatgtgggtagatctgacaccctgttaggatccaattgcaaggtatgagacttaagtcttgcattgaaaatataatattctagtatgaggtttataaagctttgggctttccaattacaacagatagcttttgtggtgtggttatccacttatcccaaggttattatctataggtatcagagttttccatcatgtctctcagcagcaaacaagtggcgtggcagtgacgtcaacattgtagtgttcaccaagactagtcaaaggactagtgcacagccaactcgcatgggtgtc

SEQ ID NO: 4846 - DNA, 754 bp, Glycine max
tgcagcctgcagaactgttcgttctagtgctgccctggcgcttgggaagctcagcggactcagtaccagggttgaccctttagttagtgatttgctgtcaagtttgcaggtgatttcattacttctattttggcttaagctgatgcaatactgtgaatctaacatcttagtattgctgaatgttacctgtccaatacaaaactgttggaatttgaatatttagggatcagatggtggtgttcgtgaagctattctgactgctttgaaaggtgtcttgaagcatgctgggaagaatttgagctctgctgttagaactcgtttttacagtattctcaaggatttaattcatgatgatgatgatagagttcgaacatatgcttctagcatattgggtatcttgacacaggtttgtagactattgaatggatttgtacttactgacatgtttctgtttcctctaatctttccttatttgaatcactataatatgtcacttccattttgttcgatttttttttttaatttttaatgattcattttgatattgttgctagattatgttattacatttgctttcatttcctagatttatcgcagatgcttaattctactttactggttgattttgtttttataatgttttattgaatgttgtgtaactataactccagtaccttggaagatgttcagctaacagagctgattcaagaactgtcaagtctagctaattcatcaagctggccacctaggcatg

SEQ ID NO: 4847 - DNA, 535 bp, Glycine max
atatatagctagctagctagctccactttagtgaataaacaagaaatctcagtaaccattctgtgattgcagtacaatggtgatgtactttgtctgagaggcactgagtcgttgtggcaggagagtaagatagctagccacaaggactagtgcgtctggatattctctgaatcagagacactgcatgcaaacaaggattatcaaagatagtgattacttgtcagttgtgacgcaagtgtttactcacacggagatcaaagttttagaccacaaatgactaagcatgtggattaattattgttgagattattctttcagtttagtcttaagtatgcaattgctataaatattctgaggaagaattttttcacttataatagtctcacctgctatctggcttgagcagaattacttccaataaaaaatatatgtaatcttaaaaaaatgttttagaccacaagcaccactttgaagcaattgcaaggtgaaaacacaaaggaaaagaagaaggtatgtgggtaacgacaccaagcca

SEQ ID NO: 4848 - DNA, 814 bp, Glycine max
  misc_feature (790)..(790): n is a, c, g, or t
  misc_feature (792)..(792): n is a, c, g, or t
  misc_feature (794)..(794): n is a, c, g, or t
tgtgactgaggaactcaaagggcatggtgcaaaaccagccattgaaaatcttgacctccacttccctaagagttcatgcctttccagcctctcatccccctcacatgctaccatgttgacgatgtcgcgagccacgcagtgttgttctgcattgatcctttgcttatcatctctggggagggccacatctatggactcaaacatagcagtgtagtaactcaaggtctcaacaaacctttggaaaaagggagaagtgttggtgttggattcttgctcaacaagggtcacaaccttgggtgacaagcttttgaccagtctcaatagcctgtccctatggttctctgtgctcacactctcatctggcatgtggtgcaaaacaaaagggaagttcacaactagagcttccccgggttgaattacaaggttttctagttcaagctcacttccacacatagcagcactgtggaactcaaatggaactccacaagatttggcataatctgagaggcgttttcctacaatgtgaagtcctccaccccttgcatgaaatgattgtgaatcatcaactccggttacacgaatgaaaggtgctccacctggacgagatgcaagagcctgaataagcaacagccactgagtgccctgtgcaacttggaagtcaattatgtgaattcttgattcattcagcattgcttctccaatgacagcatttgcagaatgtgtaagcaaacttccaatatgggcaaatctggtacaggatgtgcatgtaagtcatgagatcattgcttgntngnttgttcacatttcaaggcct

SEQ ID NO: 4849 - DNA, 702 bp, Glycine max
tgcacaagatattgatccttacactcattaccaaatattgcaaagcaattcatgccatgataatagcagcagccagggaaccactatttcttttgaaaccagcaaggagcaatactttacccttgaatcatccccagcaatcaatgatctcataggttgtgattctccttcctatgctagtgtatcatccaataggagtcctttttctccacaagcttctcattcagaccagcatcagtcatcagacaacacctatggatcaccaacaagtgcacactctagatatgatgatgacggctacgaattgaagaacaagcttagagaactcgagatttcgttgttggggcctgattcagacattgttgatagttggcactgctcctacaagggtggccgccacagagcatcatctccaacggctaaacacaattgggatcagattgtggaaatgattccaaaattagacttgaaagaagtcctcattcggtgtgcacaagccgtggcagatgatgatattgaaacagcagtgggatttatgaacaatgtattggcaaagatggtatcagttgggggtgatccgatccagaggttatgtgcctacatgtttggagggtctaagaagcaggtttggagtcctcagggagcataatctacaaggccttgaaatgtgaaccaccaacaagcaatgatctcatgacttac

SEQ ID NO: 4850 - DNA, 805 bp, Glycine max
  misc_feature (739)..(739): n is a, c, g, or t
acttgtataggcaaattctttcaaaggaagttgcaaaaagtatggctgaggatggaggcttgccttcatcacctgttgcttctcagtcttcccagggggttaatgggctaccagaagtcaagaccaatgaagtgccaaaagaaaacattctggagaagccagaaaagcctgagagcacttcttcccctagagcttcacatacagtaatttcaagtactgttaagaaacctattggtgctaagaaagcagtgaagagtggggggctcggcgctcgtaaactcactaaaaaggtatgcaaatagttatctttgtttgcagatgcatgctagaagcgcctgttggttgttggtttttcattatcttgttcactattttcatttgatgactaattatcctaatgaaatgcagccaagtgagtctctctatgagcagaagcctgaggaaccccctgctccagtttcatcttcaacaaacaatatgcctgctgggccatctccaacgtctcggtttgagtatgtagaaaatgtccaatcatctgagttgaacactggaggttcacatttgcttagtcatgtgtctccaccaaagtcatcaagcttctttgcagactttggaatggatagtggctttccaaagaaatctgggccaagctcctccaaagtgcaagtaagccatatgctttcaacttttgcccctgcaatgttatgtcttatgcatgaagctagcatacaggattaangtatgaatatctaggctccgttacttgaacgtttttgtacacattgagatccatggaacaaacatg

SEQ ID NO: 4851 - DNA, 762 bp, Glycine max
ataatggtggtcatggaggccatggcagatattcaagtgttcaagtttgtcgcaaatttggacatgatgcttctgtttgctatcattgttttgatgaaaactgtgcctactatgtctctgaatcctccttcttcagtcaatcctccactacgtcaaggtatcctccacttagggttccctctcaatttcctttttctggttcctatttattcatgcctcaaggacatgtttctgttgtgcttcatgctataccacggcaggctcccttcatgaaccctaatttttcgaataattttttgcaccccactcctcaagctatgcttaccagcgctaaacctcaaggttcagcaagttggtaccctaactcaggtgcctcccatcatgcgactaatgtttccccgaatattcaacaactcctatagggaagttaactagttatggtagattttctgcaccaaactacctattttctccctgaataaatgattttggagaaatttactttccatgattttggagaaatttactttccatagaatatttacgtcaattggctataagtccatcaaccttgaccgaggattgggctataagtacatcaattatgactaatttagtcaaatatggacttatcttttgaagaccaaattcttgtaacttatcttttaaaaagcaaattggtagtttaataattaatatatttagagaggaaaaggaatatcttaatcatgaatcacgattgaacaaagttggcccttcaca

SEQ ID NO: 4852 - DNA, 703 bp, Glycine max
tttgaacatctgtatgcctgcagtgtggtgtggttcattgcattgccatggcttctaaattcaagagtgtgtcctccattcggaagatcacgcatctgagcggtgatatggatcaggaggatgcgaatgggggaagggctagtcttgataactactcagttcacattcctccaacgcctgataaccagcctatggagatttcgctggagaggtcgaattctcggagagtggaggaccaatacgcttctagttctttgttcaccggtggctttaatcagctcacacgcgctcatttgaaggacaaggtgactgagtcagaatccagccacccccagatggctggtgcaaaagggtcctcttgtgcagtgcctgggtgtgatggaagtctcatgactaatgagagagggttggatgtggttccttgtgagtgtaattacaagatttgtagggattgttatatggatgctttgagggctggtgaggggatttgccctggttgtaaggacccttacaaggagcctgaggttcaaggaggtgtggccaactcacaggcactgcctttgcctccgcctcctggtgctaataagatggacaagaatttgtcgctcttgaagagcaagaataatgaatttgatcatgcctagtggttggttgaaacccaggggagctatggatatgggaatgctatgtggcctaataaaag

SEQ ID NO: 4853 - DNA, 795 bp, Glycine max
tgcctgcaccagaatcttgccggaaggactccaaaattctacggttttcattatctacagaaggttgtagataaaatctaggacatgattctaccacagaatcctttctttcccgcactgtccttaatataagtgtcttcaagaagttcattacttgaactgcatacatcaatgcagatatagggtctgccatctgcaatcagaatgaccaaatactttcattgactcgaacctactatcagatggaacaactatcacattggcatctttatttactcttggaaaaacacagcatagtaaagacttcactaaaggtaaaaatattgtcaagacaagtagtgcagaaaagatttcccgagaaaagaaaacaattggatttcaaaagatttccatatgcaatttagtaaagtagaaaatgaaaatatatagcacttgtatggtacatcttttcttccttgcagtcacttgagaatgaaaaaatatggaaacacacctgagtcatgtttggtgcaaaaaccatggcaatgttacgtgcattcatcttattaacatgctcatgtaggacaacatcagccatcagattgatggcccagtccaagagtgaagcttcagtatgaggtagatgtctcactagttcagaacattcatcctcagtctggcattgcattacctgctcgggtgataatgaatctagaatgcctgtagaagttcccctaaaccaagccttgaaaaagcaagaatatcaaaatagtatctaataacatgcattttctttatgccaaaaaaaagcacaca

SEQ ID NO: 4854 - DNA, 1313 bp, Glycine max
ttatggatattcccactatcttcattgttagaagcagagaaggttcttggagaaatacctagttatagtgttcaggtaacagcttcttccttatttcattttctttatagttaggaaattaatgttagcatgccactatttaccatcataagacaaataatcttgacatacacaaatttccttttcataataaaattatgtcacctcgagcgtgagtcttggctcaatagtaagactgctgttagtgccttcattcatgagggaggggctttgtgcttgtgaccctcttcaaattatcacagaaacaccctcccaatttaaatttaaattttaggctttgtcccgatgcccaattattattgagggatacctatttgacttctgcacgcacttagtaattgagtttggtgagattagctagtctgagagaaatcaaatagggtttattcatgactacctaacctattgctatctctattacaactgttggtagatggacctttcatcgtttattctgcgaaaaactgtttacaatgtttgggatttcgttgtgaagtagtttccatgttgggcgtgaagtgaatttttgtttctcagcacatatttgttgtgctgatggcccttttgaatatgttttatctttgatgattgccctggctgtttgagtataagctagtgagtagtgtttttttggagatttgtttgttccttctgttaactaataggttgttttatgtggttcttctgaattatttggttggagagaaactagtgcgcatgagttttaaaacattactatggagataagaggaaacccatggtgtatatgattgccctgaattctactgtaattttgggttgtctccatttttagttttaatttcatacttgttttaatatatatatatatatatatatatatatatatatatatatatatatatatatatattccccttttggctcttgcgaatatcaattttccttgcaaccctgtttatgcacccttggatgttctaaatttttaatggaaagctatattatcaaaaagcattctatgtggataataggattcggaggtgcaaagatgggatctgggatcacttattgagtacattttttattcattgagtaataaaaacctgttatccctgagtaagcatgtatgccagatttttatgcttaagtttgtggttttttcctgcgattattttgtttcttatttcccatttctatatcttttaattttcctccttcatatatttaaataattttacaggtagataacttagatcccttagtgaaacgtgctg

SEQ ID NO: 4855 - DNA, 687 bp, Glycine max
ttggtatcaggtactgatcacagctgttttcatgtgaattgtgtttatttactctcatttttttgtctcaaaaagttaaacatttagccttttcttttccttttttttttttaatttctgtttgagtggtagactgataccttgtatcttctaggatatgaggatttagcttattttaaatgtttgtctcaatggttatggtgcaatgataatatggcattctgaaaaacaataatttctttccatgattcttattttaactgcgcgattattaatttcttgtgccatagcacagacatgctgttggaagacctgctccaagtacatctcttgatttgaagtcttctgcatttgatcctaaagaaaaagtgtggactaaatttccaccagaaggatccaagcacacaccaccacacccttcttgcgagtttagatggaaagactactgcccagtagtgttcaggtaagcttttgatcaaactcataagactaaataaatggttctctcttttttttagtccaccaaaattttgttcatcaagtaggtgaaccgtgttttgtatctgaatctgcaacctgttgagtatgctcttgtggatttgtatcccacagagtctgactgttagaactttattcatctggctttttttttattttttattttatatatatatatatatatatata

SEQ ID NO: 4856 - DNA, 776 bp, Glycine max
gtctgcagatcagatagagtccatgccatcatctgaagtgacttgagaatattgagggttaaaagcaataagtcttcaatttctatttatacataaaatccaaattagaagtgatgtttgatccttaagttaaatccatattattgtttgtattaattatttttacattaaatatatttaataaaaaaagatcaaagctataaccacaaacaattagaagacagaaaatgatagtttaaaaaaattcaagatatatttattgttatgaattaaattaatcatttttcttaattttgatgaattagataattatgttttataaataggattatatatatatacctctgtctgaaattgccgaacaccttgagttgaatgagagagcatcttcacggctactcgtgtttcacctatgcaaccatagtagacagttccaaatcctcctttacccacaaccctctcaaaattattcgtaatcatttgaacctctgagtagctgaactcttgtttcttcgagtctacatattccattttgttggaaaacttcaacttcttcatactcacaacaactgatattgaagaaagcacagtacaatttggttactactttacattcagttagtatgaacatattaaacagtatattgagggaggacaaggaaggtattcaaaagttttcttttccgaaattaccttatcgttctctctcttaaggtaataataataataataaattttaaaccatttgccaactcctggcctaatattaccaattt

SEQ ID NO: 4857 - DNA, 896 bp, Glycine max
cggggaatctctaagtcgactgcagcagcttttacgaattacacttgaacaaataggagaacgaaatccttgatctccaacgtttaatcgttttccagacgatgaaaacattgatatatccttcaaatcagataatttacgtttcgctggcaaggtaattggagtcttaaactgagatccagtatcaatgttatgtttcactgaagatccaaatgtagtctctaccacagtagtttcggatgactctttaccagtatctgacaatttcttcactgatgactgagagtcaaggtgttgaaatcttgaatgaaaagatgatgagaaagtcagtgattttttctttgcagagacagaatcacttttcaagccggcatcatcatcctttgcattaaaccttaatttgtgagtgagaaatcctgaaagagcacgaccagagggccactgaatttgtgttgaagaagcttcctgtgtgatgggttgttgtgcaagagaagagggaggaaccaatgatggcaaaggagtcaactgagcctctttaagcaacatagaagcagtttgtgccaatccagatgcctgtaggtgttcgtggattaggagcaggagttccctgaacaagataaacataacacaaaagagtcatcaaaagggctccaccaaggggtggaaggggggcagcacatgaataggaaaatcctgaacagtaaaatttagagagagaaaaaaaaccttgaatgggtaagtaattaggaagtcgcagcagctatagctgctctttctatgcgctcttaagttgggagtagctgcatcagtagcagctaatgtacttgcacgccctgaattagtacatctacaatacatttcaacagagtatcatatcagccttctaagcacatact

SEQ ID NO: 4858 - DNA, 1444 bp, Glycine max
aaacttggaaggtctctgcaccgaagcaagttttccatgcctggcatattccttattatgcggtccatgtcctcttctcctacaaattaagttacaaacttacaatacgccacactataatttcttcgtatgtatttaaaccacatcactgataccaactcctgttttgatagttcctagttgtgtctataagtgttgattgaatgaatatactataattcctattggatcatccagtatcaatagttgctgctttcaatattgcatctacctaaggttttaaaatatggtcacagtcctcaacatcaaggttttttaacggttaacaaccgcatacagctgcaattaagattgcattgaccatatttgcccacgggacgaaatcgcaatgcgacaacgaccaatagttaaaactaccatataaattaataacatcttccgaaattgactctatactgtatatgtacaagtaattcgagtaattaggggggaaattaattaaaaatgaatacaactttctgctaaagaaaattttgttctgtattctgtaatttctcaacaacagaggttggaacatatacagaatgaaaagcacagatttaaaaatggcataagtagagtgggagctagcgatgaatattgaatctgagtactccatacctttatggggaagttctttgcagtctaagagctttggaacacagaaataagcccagaagcaacaggaactgacggttcgaaaatgaatgagtggtatacgtaactcagcagcaaaatcagaggaaagggcaccgaagattccatcctgaataatgcaactaactttgggaattccaggactgtgctgggacagcagaatgtctctcaaaaagggcttggcgtgctgagccgtagatgtaatgaagtccccaacacggtctccgaatccagggtgctcgccttcttcatcgtaacaatcgggaatggtcttgaaatggagcgtggggtagcattctgagagttcttgaatgtccccgaaacgagtgaggcgaatgtggatgttctcggtatcgacaaaggtgacgtggatattgtctagggcaagaagctcggcgagcttgagcatggagcctaaatggcctggcaatggaagagggaagatcagcacgtgtgcttttgccatattcaacaactaatatcgtctttgttgcacctcagattacggaaaaatatattttgttgagaataatcctacatgctatttttagtaaacttgataaatactaggtagtgatttttaagaagatcttttaaatattttgattgctccaatataaaatttaatatattttgacaccccaaatgttagtagacacatgttgtccaatgccgacaaatagaagaatcgacactacaccacttacgtatcttaatgtctttctggtcctgttgttatcatctctcc

SEQ ID NO: 4859 - DNA, 741 bp, Glycine max
accgtgacttggctgagcttagcttcaaattgaagtcttacttattacactgaatcacctcgtacgcgatgagccatgtttaaattttaataaatattataatagtaagctgggtttagattttctttttattgaatctatattagtataaacaatttaagtaaatgtgttttaaaaaatttttatcgcataagagtcaagtgtatcataagtttcaccataaaatttgttgtaatagattataaagaatttattttaacaaacttcactaaggaattcagaaagtaagctaagaacagcttatacaaatcaggtcatttttatgcaatcaaataaagtttttaaaagttacactccttgaatcaattactctattcaaggacaatgaatttgttgataaaaaaaaattactcacccttgatattagcagaggaaacattttctgtaaatgtaaaattttgatacaacccactcttttcttttcttttatagagaaagtctctacactcgtctaagaatatagatacatttgcctttgaaaaattaaaatcttactaacatccacgcgatcacgcttcttattggtatgtctggatgaagaattttacaataaaagttttttttttcatttttgaattaaaggagttgtgcaatgttgtgagaaaaaaaaactagaatattaaatgatttcttcataaagcatcgatttactacttacttttattttgtaaatcactccaa

SEQ ID NO: 4860 - DNA, 750 bp, Glycine max
tgcctgcgcaacctccagccgaagcagaagggccatccctacctccagaaggtccaggaattccaccatatcctacttttattccataagactgaaaccacacgaaatttatcagcatattaagtatttgctctttgaatcaggagaatgtttttcactttcgaatcattatccccaaaatgcatccacagattgtaaaaacacaaggtagactgaaattaaatatcccactaattctccatagtccatattccaatataaataatgtgaaatttccataaaagtgatgcggaggtaaagaatgacaaaaggctgaaaagaaagaaactgacctcatttgatacatcaaaaactccatcttgaatctttttgtatatggttgcagctgtttttatgaatgcctgcaagaggataggctatatcaaaacttccatatagataattttccaagatatttatggtttgttatgatacacatccccaactcaggtctcattattattttcacgtcagatttgaaaggaaaaaaaaaaacaacacaagcaactctttgtagcttctgctggatgggcgtagatctactattagtgtgtcacctagcatgcagttaacctataagcttaaatatgttggaaatctgacttttcttgtggggagtgaggatgaggagatagatgaaaaaaaaattcaagatgttattatgaatgtgactttttgacctcttcaacattcttgagcagttttgctgag

SEQ ID NO: 4861 - DNA, 1777 bp, Glycine max
tcaagtgtgcttataattgggagagttgtatcaaaggatgtcataattacaatacatcagattttgctaatgcagaaaacaaatgatgaaaggaaaacgttgtttaggaaagccaggttagcaaatatttcatttcaaatcacacctgcaaacccattaatgatggttgactcagtattctctcagccacttcctctgcactgcttcccctcatgtttgcagtaacctgtcaagtctagcattagaaaatggaattaaaataaaggcagacactggtggagttaggggggagtggaaattataaactatgcaccgtgaactgcccaatggccctgagatgtgcttccaatctctcaagcatctcatgtgttgtttcaagaactcctttccgttggatcactgatttcctgcttgcaataaacacagcctgaagagcattcaattgccagagtgagacagaaccccacaatgcataatacagagcaggtttcccatgcctactatttttttatttaattgaaaaaccaacaaatcatgatagtcaaggtcagaaaagttaacaattgataacctggctttccaaaacaactccacctttgatttccttcaagttgttttctctcagtgtggtcccactacttacaaggtccaagatagcatcagctatccccatctaaaaagagaaaagacaaacattttcttaaataaatcataaatatcacatccaggcatccagcatatattggcagcagcatcactaaaatgaacaagcagcaatcaatacttcaattcaggtgcaaagacttgagaatcatatgcaaaggaataaaatgggaaagtttatgtctgggaagggaatataatttctacaaaaaaagtttgcaggttgcaccatgaaatttgtaaaatcctaaccgaaaatcacagtaatagatgttgccacataaagaactctcaagtttgttttgtcatttcactaaaagcagagtgtaatgccaacagacctttggcccagtagttaaccacagtttacatctcacaacttctccccatagcataaaacataaacacacacaacacaaacacctaaagtttaacaaaagccaatcagaaatttttattttggtcaaacttcacaattcagtaaaagcattgcagaatttttaaaatctttcgcattctcattctcctgcaacagaatttgcagaaaaacaatctggttgggcaagcagtgacatcactcatatcctcattctttactttacaaagtaatgctgtcatcaaaactggacactttaataaatgctgatcaccaaggcacacataccttaacaatgacaatgcgtagatggtaaacaacaaaagcatatatagtgctaataatcttaggcatcggaaaaaaatatttttagggaacattcaagaaacacataagtttaattcactgaatgcaaaacattgacagctattagagtattgtaagagttgaagttattcaactgttttccttgtatcagactatcagttacactagttagttctagtgagttagtttaccaagttagtgagttagttaatgacagctgtcataactaactgttcactctataaattctaaactgtaaccttgagttcagtggctaataatatttcccttttctcatttctaaagtttttcatttctctcaaaatatcttctcttagaattcagttaacagctgtatgcatatctagcaacaattagccaaatacaatgtatctgcaggcatgcaaactg

SEQ ID NO: 4862 - DNA, 1483 bp, Glycine max
aatctaaaacctcggtctagtgtgttatggcaaatttcctccacaggccaaaaaacaaaaaagatcaggcaagaaatagaagtgctaaacggttaaaacgctaaccactaaccacacaccacagatatcaacatacacacaagtcaagttttcaaccaagttgaacaattggcgaagaatgacaaggctcatgaacaacaacaaaaaagcaaacacctttcaacaaaaagtgaaaactccacttcagaaactccacaaaaaaagccccaaaaatgagagagaaaacgccaattgaaaagagagagaaagagaaaaaccttcgagaacatggtcttcaggtccgagagaagaatccccacaaacatcacaaacaactcttccatggatttcaccagtccaagcactcacatccgaagcaaataacagcagcaacagaatcaaacccatcactgtcttctgcttctccatggttgagaattgagaaaaaaacaaccacaaaaaaaacgctacctttctcagagcactctgtttttgggtttataggtagttttcttataacgcccacagtgcattgatttttcaccgacacaatagctgcaatgttgaatcactgagtccaatgaccgagtcaacctagtagggactgaagtgtcattatgtaaaatgttcaggggttaattggaaaataaaaaaatcatgacctatgttctggcttctataaataccaaccaaaccctatgtatagttgctatgttttgccgcttctgagagggtactgagggggactggtaacgggagggttaccatgtgttttggtgcattgagaattttctattgatgtttgtttatttttactgtttgtgttacaaatctcgtttagtttgataacacttttgttattgtcaatgttgttgttattgtgtattgcatgctataaggttcatttattgtttcaaaagttagatttttttattgatgtttcagaagagtggaaaatgaacggattcatggttgttgtattaatgtgggaaatattaagggataaaccggtatagacactcacaatcatgctcaatatcacttttaccagatttgaattcctgagtgtttctctttgttttctttgggagtattatgtgtattgttgtgactggttaattttaatttaaactggatgaagttcttctcttttttctaccctcttttgatggggaaaagtttgtatatttcaatttgattgattgcaatatggttaattttatatttcacggtaagttgtatagtatttttcgaagggtaaagatgattttttgtgggtttgtttgatacttttgaggactgaattcccttgaggagaaataaaatcagagggatgtacatatctgttacctattattgttgtttttctgcactttgtgtaagcattgtgccatgtagcatccattctgagtcttaatgtaaagcccaaggttttaaatattgg

SEQ ID NO: 4863 - DNA, 677 bp, Glycine max
gcgctgcaactattgtataggttacttttcaatccggttcatatgtttcttctaggaagcttttcacttggggagacggcgacaaatatcggttgggacatggaaacaaggaaacgtaccttcaaccaacttgtgtctctgcacttatcgagtataatttccaccagatagcatgtggacacaccatgactgttgctctcactacatctggtcacatttttactatgggaagcaatgaaaatggtcaactaggaaaccatttggctgatggaaaagtacctatcctagtacaagacaagttggtgggtgaatttgttgaggtaatatcatgtggatctcatcatgttgctgccttgtcatcaagaagtgaattgtatacttgggggaaaggtgccaatggaagattgggacatggagacatagaggatagaaaatcaccaacaatagtagaatccttaaaagataggcatgtaaagaatatttcttgtggctcaaactttacatcttgcatatgcattcataaaatgggtctctggagttgaccaatctgtttgcacgggttgtagacaaccctttggattcactagaaagaggcacaattgctacaattgtggattagtgcattgccatggttgtagttccagaaagggattgaaaagctcatttgctccaacacc

SEQ ID NO: 4864 - DNA, 860 bp, Glycine max
agatgataactaacttgtaatttaactaaggacaacaattcaattcttcaagcaggtttttagggaaaggaaacttgttgttcttcatggcaaagctctttccttagtttatgcgagaagagcttgcatgcatccatgctaagatcaatggcagcagaaagtgcaatgaacaaagcagcatcagccatgcatgtcacatgctgtgcaccaacttgcacaacaggcttgctaactttgccttcaccttccactgtggaacccatcacaaacccttttcctttcaaccttgaacccaatccagaatccctcatcactttgtagtcaatgcagaattggccaccctttttcacattcattgtggcctcagcaattggtatcccattggcaggtccattctcagtgacgagctcaaacttgtagcccaagccatcgacagggcctcgttctcgccacgcttcgagacggccccatggcttccagctactcacagaggcaccattgttggggagaagaatgagccatgcacctgggtttgatcttgatactctgtctgaaccaggggaagggacaaatggggttatcatggaggcagcagcaacgggtgagccagagagatcatggatcattatcatccaaccctttctctccctcccatgacgctctctaatacccttcaaggttctcctccatctacgggggtgttgtggccaaatcttgaggtagacacctgaaatttcattaggtaaaaagaaaaacaatcatgaataagagccttcatgcctagatgccaatcatagggtgctctaaaaaaaatgagaatactaccccattatctaaataattgagagatattttaaaag

SEQ ID NO: 4865 - DNA, 1445 bp, Glycine max
tttatctgagcttagctttgacccaagacctgagattaggaagagtgccttggaagtcctgtttgaaaccttacgtaatcatgggcatctcttttcactacctttatgggaaagagtatttgagtctatcctatttcctatattcgattatgttcggcattctattgatccttcagggagtagttcaccgatcaatgaagtagaggctgatggtgagcttgatcaagatgcttggctttacgaaacatgcacattggctctccaattggttgtagatctttttgttaacttttatgacactgtcaatccacttttaagaaaggtgctgatgctcctggttagctttataaagcgccctcatcaaagccttgctggcattggtattgctgcttttgttcgtttgatgagtaatgctggggggctgttttctgatgaaaagtggttagaagtggttttctcattaaaagaagtagcaaatgcaacacttcctaactttttgtttgttgaaagtgaggactttactaaaaatcaggaacatgcttcaacagctgaagatgatagagatcgtgccgagtctggctccccagataatttaaaaagcttgaggattcgtcgtctttatactcatttaactgatgcaaaatgccgagcctgctgttcaacttttattgattcaggtaattttatattctgttcctccaaatatctgccttgtgtagaaagaaattaagaaggagcccaagaactgtagctgtggcatttagtttattcagaaaattaagatcctttatttatttatttttatggttaactagattcttattattttagcactactcaaataatggataatattaaaaatatgcacctgatgggagcagatgtgtctttcctattcagcacctcattccaacgtgcattggtgttcacttttattcttccctgtcaaattagatgcatgtgatgttgcaaaatgatgttaactctctttctgaaattggcaggcgatgatggagatctataacatgtatcgccctcacctttcagcaaaagccatgctagtcctgtttgatgctctgcacgatgttgcgatacatgcacaccagattaatggcaatactatattacgttcaaagcttcaagagtttggttctgtgacccaaatgcaagaccctccactgttacgccttgagaatgaatcgtaccagacctgccttacatttttacaaaaccttgtcattgacaagcctcctagttacgaggtggacgaggtcgaatcacatctcatccagctttgtcaggaggttttggagttttatattgaagttgcaggttttgaacaaaaatctgaatcttctcatggtagacagcaacattggttgattcccttgggcactgggaagaggagagaattggctgcacgttcacctctcattgtggctact

SEQ ID NO: 4866 - DNA, 1475 bp, Glycine max
aatcaaaaccatcatcccattggaacgatcaacttagttcaatgctgtgataccactccaacttgatgagacacagtaaagaaggagattacatcatggcaattggcaaatgctaagctttcagaggtcggtggcagactcaagaataatggaatgtgtagtgcctttgtctcatacctccattacacttcagttgtacctgagcttgcttccctattttcattaattttgttcatgtttatatgtgagttgaatcttccccgcgaggacaaaaagataaaaaaaattgtaaatataggaaccaaaatgaatgtcttaaactatagggactaaaaaaaaattatcacaactataagaactaaaagagtaattaaatcaaaataaaataaactagtgcaaaataatggtggtgtggttagacacttttaatcctaaatgtctcgttgttgacatatatacctctacatatgtgtgcattttgcaaccaccaccattagtggagtaaaattttaaatgctaacccttctacggtatatatcctatataggcattgttagtagtaaataccaaccgtgaaccagaaaattgtggattcaacctttttcgtcttccttcttcttcatggcagtgctatttgcaactcatgttcttctcttgatattgtccactgcaacaactctccacttcagtgcaagcaaggcagcaaggctcaatatgacttgcagcgagaaggaaaggaatgcactcctcagcttcaagcatggactagcagacccttcaaacaggctttcatcgtggtctgacaaatcggattgctgtacatggccaggggttcactgcaacaacacaggtaaagtcatggaaatcaatcttgacacacctgcgggctctccctatagggagttgagtggagagattagtccttctttgcttgaactaaaatatttgaatcgtttggacttgagttcaaattattttgttcttactccaataccaagcttcctaggctcattggagagtctgagatacttggaccttagcttaagtgggttcatgggattaatccctcatcaactaggaaacctctcaaacctagcaccttaatcttggatacaattatgctcttcagatagataaccttaattggatatcaaggctatcttccttggagtaccttgatttgagtggttcagaccttcataaacaaggtaactggcttcaagtactgagtgcacttccatctctttcagaactacacttggagagctgccaaattgataacttaggaccaccaaaaggaaaaaccaacttcacacatctccaagtccttgatctttcaaataacaatctcaatcagcaaatcccttcatggctatttaatctcagcaaaactcttgtccaacttgatttacacagtaaccttttacagggtgaaattccacaaataatatcaagcctacagaacataaaaaacc

SEQ ID NO: 4867 - DNA, 816 bp, Glycine max
  misc_feature (773)..(773): n is a, c, g, or t
gttgcctgcagtaaaacgcaaatcgaaacatatatgtacccttgtcaaatataaatgactttttaatttgtatgcctcttccaccgacataccacaggcacctcagctgcgaactcatcatctgcttcaacttattgccacacccaaaaagagcccacttcttataagttgacaatatctacttcgccaagacatttaattccacgagctttaacagtactataagccgaagatctcaataataacttcactattgtttgaaataacttatgaatgctgcacacaaagatctcaacaatagtttcacctttgttcaaagtatgtttagaaagctcaaaaaaacataatctaatcacaatcacaatcatatacaaataaccgcagcacaacaagactactactataacatacggtcaatgtatcaaatgtaactagactagatacagtcttaagccccaaaggcaaaggaattccctggcttgggaacaaacctagttacaatcaaagcagctaaagtgaagacacattataaggcgtatacaacacaggttcactgtaatattatagaatggcagagtggccttgtagccaagagcaagctctcaatggaattataacctttcagatagatactttgccagataatcaactggcttagttgagtcaaaatttccactcctctgatgtcgttgccttatctttgtgcgagctaggtaatcaactgcaatccaaggaaaactcaacatcaccgtacttcccaaactatcagcctncttggttctctgaggaattaatcttgcagatcaagggattttt

SEQ ID NO: 4868 - DNA, 667 bp, Glycine max
gcatgcctgcaggtcttagctttgctgtgtacgcgtttcctataattgctattgctataattggacttcttttattggatttgaaagctggatatcaaagaagcaggtaataaaatattaatatctatcatgtgccgttcaattattattatggttatgcacatttcacttcaaaatttgttttccttggtactacagaagcgcaaggagtactccatcaaaatcaaacttcttctcaaatccactggtggtgaatactacactgggaatcttatctagtattgaaatactgatagctttccttttcattgtcttcttagcatggacctactactctcgtatttatacagacttcaaaaagttgatgccatacaaatcactgaagttgaatacgtaagtgttcttgatcattcccttatgttgtatttgtagaaaaagctattgtttcaccaagtgaataacttgatttcaggtggcaactcaagtatcacagaatagcaacccggttcgggttgctagcagaagcttgcatggctttggtgcttcttcctattctaaaggggttggcccggtttcgcatacctggcattcaatttgaaacttcagttagataccacacatggattggaactgcaatgatactttgtggtacaatacatggggcaag

SEQ ID NO: 4869 - DNA, 840 bp, Glycine max
  misc_feature (788)..(788): n is a, c, g, or t
acatagaacattttgcagccccaggcaactgcatcaaaacaaagtgttataaggaacaaaatacttggacaaaataaaatgcagaaatatataacatatatactagcatgattatagtcatcatacattgttactatagaaaaaagacaacattaaactttaaactaatgaaaacagtgttgtcaaaagtggttcatctggtcatctaggcagggcagaaaacagccacactgcctcagatagcctgagggaagcaagtttgatgatgcacctatgggaccagatcctgcaatttcagataacttgctaattcactatggcttaaaacactcagtagccaatgatatctaatataaaggggtattctggtctaaaaaccctaaaaacaggatctgaatttatctgttgtgtgtgactcacaatccagaagtcaaagctccctttatcatgttatttccatgatctttattcatagccacatctgttttcgactaaaactactgattttccccctttacatccagttagatataaaatcattcatgacccctcattgaatatattgtgcttttaggagagttgatctgagacatagtattaaagcctaaagagtttgatcatcactgcccaaaggtagggtggacttttgtagcctaaagggctcctgagtgagtgggtgtaagattaaaaccattcatgagccttcacctaacaaataatgttttaaaagagttggtctatgacatctgcatttattctgcaatatttgccactgcaacttgattggnctctcgactttatttggatgtgacatagttatatttctagtcaaattggata

SEQ ID NO: 4870 - DNA, 1469 bp, Glycine max
attatataaaataaattcaagtcaaaggccaacgggtgttggtgatgaagtatagataaaactgacaacttgtgggaatataaacgaaaaccaaccttcattttcttcccaagaatttcctcctctgcattataccatttaaatgaaagtggactcttacttgacggaccctgaaaatttaatttttgcaccaatcaggattcacacaatacatagaggaacaaacagtccccattaagaattctcaattattaattttacgtcaagatcttgatgcaaaacaaaatatgaaaactaattaagttgaggaagatcaacctctttctcttcttctcctccttcataaaagacagataatatttctttcgtgctaagggaaatgaggcattaccatgcaacccaaagccccccagaattaatattcattagcaattttaaagttccaaaaatctgtagtagttagaaggatcttaaactatcaaacaagttaataatcaaataaaacctcatttccctgacttcgcttcattttcatttcattttattccattggtctcttactctcttagcacggaaaatatgccattacaatccttgtgtgacatacatagataaattgtgacaaacaagtctacctcatatttaattttgggaatgccagggaaaaactccccttccccattcatctgaatcgccgcatttattccgcatcgttagcagcgcaagtttgaggagcaccaatctgcttgccatcaaacaaaataaattggatttacatatcatgatccagaatcgcaagtaatattaaataaacaataatagaaagagggtacccagtattagttactaactttaattttaattatcagttttgtgaaagtttatcaaatctgctgaaacaaaaacctgctgtgccgtcacaaagcgaagattctgtagatctatgtgccgctgatagaaaaaaacaagatgctagatggtagttataacttacaagtcaatgttacattactcaaagtcaatggagatgatattgttgactgccaccatttgcttattggccatttttaattttccttttcagctatgaagagccaaacagtgaagatagcaaacttcttatatctgtttgaagatggacagaatccatgtctctttcattttagtgaagttcacggaagtttgacaaggatgaaacaaagtatataaaaaaaaagttcacgtagcaaattttttgctatacgtatttcttctttgctccttttcatttatcttcttgatggaagcaattttcttcttttctcgattttcttttctgttgttctttttcattcattaatctcttcattgtaaaataataataaatgtgaatagtatttgcattaattcaacgagttaacatgttgtgagcaaatacactactattttatcatttattctctgcaggtggactctacagcaacaccggg

SEQ ID NO: 4871 - DNA, 780 bp, Glycine max
accttgaagggccacccggttatgctatagagtccacctgcagttctgtgttcattaatcaactgctcaagtatttttggatcagtaaatattttacccagtaaatccatatcaatcaaggttccttgctcattactccttataatggttgcaacaactgaagaggctgctgctaaatcagcttcagccaatggccttacacaaggatcatgggaaacagcaggagaggcattagaggctgaactaatggaggtttttgctgatatatattgctgagagttctgagactgcacattgggggaaggcttcagtgctactgccaattcaggcagaatatccatagattcttcctcttcaatgggaatgatagggatgagaggagtaatgccatcatcataatcttcctcttctacatccaaagagacagaagggctaaacacccaaaaacataactcaacaatgttagcaacaaaacaaatggaagttaccacaaggctttctcaactaaggggtgacattttacctaggaggaatggcagaaagacggggataaagtgcttcaagcaccctcatttctctcaggttctgattctctttctccctactttcttcacctgctgcaacacgccattgagatctgacaacaacctggattgaaaaagtaaagaaatcaattttgagataaaatttttcaccaaccagttggagatgatgtttaaaaaaaatatattcagtaagggtagtcacttgcaaaaagaaaatctaacttctaaataacat

SEQ ID NO: 4872 - DNA, 584 bp, Glycine max
ataaaaacgacataaaatcctcaaattagcaacacagtaattagtagaggatattatcatgtttgttgtagagaaaactactccagaagtataaactgttataacttagttagaacacataatagttgccctaccttgcaatgaaatttaattttaattcgttagaaaaatagagaaataagaggatcgagtaataaattacttaaacctagtttagatcagagtctaactcacgggagcttattaattaagataattaaataacatttggttcttgacataattaacttataggcgatatgaaaaaactacatgagagaacttttaaaagaattaaagagcagactattgattttaatatatgcaagattatttcaagactatttctttttgaataagtacttgtttaacaaattttccaaattaactcttagtcatagaggctattacatcagagtcattaactaacaattctaataacttaaacttgtaggtaaaaatacatgaatatgcaaagaggctgtttccggattcgaacccatgaccaacaagtcaccaagggcacagactttagccgctgcacc

SEQ ID NO: 4873 - DNA, 524 bp, Glycine max
atgccttaggaaggcatggcttcattaactactttggtctccaggtactttctaagtcaacttacaccctcttccccattttgtgtgtctttttcctctctgattagttttcacttggttttgttgcgataacatacaattggatagctaccttgtgttgtgctactttagaggtcaacttcctgaacaagcctggggggtggggggggagtgatctctgatgacatgtagcctgccctgtacactattttgaactgacatatgcagtaggattctgcatatttatcattttcccattttcctttatatttacaagagtcggcaaaaattacctcttggatgctagctattggaaaagcaatctcttgaagtttcattgtgtccaacatttgccagccctgtggatttgtaatacaagcttttgttttgttgtattttttgagatgacatacatactttgtcgtaaaaattattattatgttgcttaaattaaggacataagaagcttaaacatgttggaaagg

SEQ ID NO: 4874 - DNA, 672 bp, Glycine max
atgccttaggaaggcatggcttcattaactactttggtctccaggtactttctaagtcaacttacaccctcttccccattttgtgtgtctttttcctctctgattagttttcacttggttttgttgcgataacatacaattggatagctaccttgtgttgtgctactttagaggtcaacttcctgaacaagcctggggggtggggggggagtgatctctgatgacatgtagcctgctctgtacactattttgaactgacatatgcagtaggattctgcatatttatcattttcccattttcctttatatttacaagagtcggcaaaaattacctcttggatgctagctatttgaaaagcaatctcttgaagtttcattgtgtccaacatttgccagccctgtggatttgtaatacaagcttttgttttgttgtattttttgagatgacatacatactttgtcgtaaaaattattattatgttgcttaaattaaggacataagaagcttaaacatgttggaaaggtatacccatcttcatattccccatttcttgatgagaaagtttttctattaaaattctttgcaagtccaaactccaaagcttgcattaaaatgtaaactcttgttttacattttgctttttcatggttttgcatttgcttagtgttgaa

SEQ ID NO: 4875 - DNA, 814 bp, Glycine max
  misc_feature (776)..(776): n is a, c, g, or t
accagcagcagcttgttgcatcaaatgcattaataccacatgtccaggcaaagtctcaacttcccatctcatcattaccattgcagaacagttctcaggttcaatcacaaaattctcctcagcaagtgcctctttcacctttaacgccatcatcccctttgactcccatgtcatcccagctccaacagcaaaaacttcaccatatacagcctgggttcagcaggaatcccactgctagtgggttgactaatcaagcagcaaagcaacgcccacgacatccgccgcagcagcagtatcagcaacctagtaggcaacatcctagtcaacggcatgatgtacagtctcaacagcagacaaaacttctgaagggaatgggaagaggaaatatgttggtccatcagaacctctctgtggatacttctcaaagtggactctctctgcctgcgggaagccaaactggtgaaaaaggggaccaaatcttgcacatgatgcaaggtcaaaatttatatcctggatctggtttaaacccaaatcaaccatcaaagcctttgggtcatgctcattcttcaaaccattcacagttgcagcagaagctacattctgggtcaccaaccacttcatcaaagcaacttcatatttcttcagatactagtggtcaaggacaggtttcaccagtttcatcaggtcagtttgttgtcaccttctcacccaactgttattgcgttcgaccaccatcagctgctgccacaaattcagtctaagaaaataatcaactnaaataaatgttcagagaatgttgcctcaacacatctcg

SEQ ID NO: 4876 - DNA, 1373 bp, Glycine max
atattccaagggaacttggtcagttgagggtgctaagaaatttagatctgtcactgaataacttgacaggtacaattccactggagtttcaaaaccttacatacatggaggatttgcagctatttgacaaccaacttgaaggtgtgattcctcctcatcttggagctattagaaacctaactattcttgatatatctgcaaacaatcttgttggtatgatacctatcaatctttgtggatatcagaagctgcaattcctgagccttggttcaaataggttgtttggaaacattccttacagcctcaaaacatgcaaatctcttgtgcagcttatgctgggggacaaccttttgacaggaagcctacctgttgaattgtatgagcttcacaatctcactgcacttgaactctatcagaaccaattttcggggataataaacccggggataggccaactcaggaatctagagaggcttggcttgtcggctaactactttgaaggctatctccctcctgagattggaaatttgacacaacttgtgacattcaatgtttcctctaaccgtttcagtggaagtatagctcatgagttgggaaactgtgtaagattgcagaggcttgatcttagcaggaatcacttcactggaatgcttccaaatcaaattggcaacttggtgaacttggagctgttgaaagtttctgataacatgctctcaggagaaataccaggcactttggggaatcttattaggctcacagacctggaactaggtggcaaccagttttcaggaagcatctcccttcacttgggaaaacttggagctcttcagattgcacttaacctgagccacaacaaactttctggcttaattcctgatagccttgggaacttgcaaatgctagagtccctttatctaaatgacaatgaacttgttggtgagattccttcatcaattggtaaccttctcagtcttgtaatatgcaatgtatcaaacaacaagctggtaggaactgttccagacaccactacatttagaaagatggatttcacaaactttgctgggaacaacggcttgtgccgtgttggtaccaatcactgccatccatctctatctccctctcatgctgcaaaacatagctggatcagaaatggttcatcaagggaaaagatagtgagtattgtttctggggtggttggactagtttctcttattttcatagtgtgtatatgttttgccatgaggcgtggtagccgtgctgcttttgtttcacttgaaaggcaaatagagactcatgtcttggataactactactttcctaaagaaggctttacataccaggatctcttggaagccacaggaaatttttcggaa

SEQ ID NO: 4877 - DNA, 745 bp, Glycine max
tttgttcccttaagaaggattgaatttatccatacttatttgctgaacttcatgcacttaaattaccgttttaaaattatgcaatagtgaagctttcatgactagggggagggagatctgaaactgttttttctggatgaacagccatgtaacaattcagaacgtcacaatcattgctcctcttagttcaccaaatacagatggcattaatccaggtgaggtttctcccttaagctgaaaagtcataccctgtgtaatcaacaatgcatatctattctagattaattttcaacaatccaatgttttcatgatttgttttaaagggaaattttcatctggaccaaaggaggtctaaatttctaaaaaagtggtgcaatacattcatcacctagtgggattaggctatcgttgttattgtgttggtagtggtgcctatattcatagaaataaagctatatgtatctcctactgtagttgcgttttttcttgtctgggttaacttctgtgccctctacttgacacttgaaactgcaccaatgtccttcacaattttctttcaaaacattaatcatattctcacatatacctcctaattgtgtccagattcttcagacaatgtatgcattgaagactgttatataagcaccggtgatgatttaatttccatcaaaagtggatgggatggatatggcatttcatttggtcgacccagtacaaatattaacatccgcaggctcattgggaa

SEQ ID NO: 4878 - DNA, 865 bp, Glycine max
  misc_feature (750)..(750): n is a, c, g, or t
  misc_feature (753)..(753): n is a, c, g, or t
  misc_feature (760)..(760): n is a, c, g, or t
atcctctggatcgacctgcagatcagcaacaccattcaacttccgtcgggtaaattttgtcctgttgaaaaaatccaccaatcaaattgcagctataagtttggttgcttgaatatctaaactccataatttactaagacagtaaccaagcaccccagttttgattactcaaactcttcaagtggtttggtaaatagtaacagtctgaacaatgctcagggaatattctttctctgagaggctcgcacgcttctggtgaaaccaagtcagagtatccttttacgtaagagcagttccatggcaattttttgctcacattaagggtgatgtttgataggcagatattgacaaagttgtcacctttaataccctgtataaggccggcacgtttgactttttcccctatcacatccttgatagtaatcctttctattaccggtagagcatctgggtcataagtgtcatctggatgttctccatataaaccagtgaacctaatagcaatatctacattaaccaagatcatgttagagatatagacatttctaacataaccacccctgccaggagaagtttttattctaattgcgctatgtgaatcaaaaatgtaaatatcttctgcatgaacttctgatactcctccagacatctcacttccgatagcaatccctgcgctcgttgtcttcccaatgagcctgcggatgttaatatttgtactgggtcgaccaaatgaaatgccatatccatccnatncactttngatgggaaataatcatcaccgtgcttatatacagtcttcatgctacattgctgaagatctgacacattaggagttatggagattgatatgtttgaagaaatgtaa

SEQ ID NO: 4879 - DNA, 673 bp, Glycine max
aagattgtttaatgaagagctgcttcattcaactcagaaactaagatctgaactgaaagatgctactttagtctatgttgatatttataccattaagtatgacctcatcacaaatgccgcgaaatatggtaaatccaagcaaccactttcttctcatttaagtatccattattatttgactcactcttatgttgctaaactgaatcaagttttcctactttcactccatatattatgatgacataattggcacatttagatgactatatatatctgaacagtttgaatacatttgttattggctgaaatttgttagatatcacaaaattttgtaggtctcacttcttatttaacatgtcacacttataattttgtaatttctaataaattttaaccaatactggaaggtatatttgaaggaatgtgttgctactggtgagcaagcattcctcaatggggttaacttgcaaatggttcaagttattggattactcttattattatcataattttgatgatgtttgtgaatgcattattgattaggtttctcgaatccgttgatggtatgttgcggctatggagggcctccttacaattttgacgtaagggtgacatgtggtcaacctggttatcgggtttgtgatgaaagggctcggtatgtgagttgggatgg

SEQ ID NO: 4880 - DNA, 852 bp, Glycine max
atgtttttaattgcacaaatcctaacctttcaaaatatttgttattttaattaaaaaaaattgacagttattttaattaaattgaaacaagaaatttcctttttgaaaattaatcgcagttggatttaaaactgcacctccaatgagcctgtttgaataacgaattaggagtttttctattagatttttttttagttagaaaagtttttaaaaacttttttaactttgtattcaaacaggtccaatatatagttgaatcactcaatgaaaagacgttaagttaaaaagagaaaatcaactggagaaaatcaactggagaagtgaacactaagattatgatgaaattcctaaagaaatccatatatcatacctttaattataattttatattatgattgattaaaatatataatttaattatttataggatttagctcatgaattataaattctttgatattgttttcaattcccatgaatatatttttcttttaattattatggttcaatcacgatacaactgcaaataaaccagtaaaatgtaagcaagtagtttcacttattccattaccagtccaaatttctaaaacaggccaaaaatcattttagtcatcaattgtttacataatacagcatacatccaagttggcaaagaaaaatacaatttctggtaacataggccactagttacagcccaattgcaagaccctaatcttttagaacttcagcgtggggcgttactacataacaaactctgttcttggagaactatattgatggtaaatcaacaactaatgaactaacagtggattcactgttttgcacactcagtgtgcataatcattggtggca

SEQ ID NO: 4881 - DNA, 817 bp, Glycine max
cctcacccgggtatgctatagagtccccctgcagcagaagtagcagaaacaaattaacgtgcagaacttgtggggatgaaatcatgcagcatgcgagaaggttcattccagatcgacaaatattgctcagaacgaccactgcttgtcgactcagcataaattttacaagccaacctgtcaagatatggaataacccgacaaaacaagtgttttttttttaatatttatattagtattctcctaggattttgaaaatgtaacatttaagaattgagaaataataaaaaaatattttagaaataaggataatgtacaagcaaattacacaagtcaccagcccctcttattttactttttttttttcctacaatacactctataatttcctattagacgtatcgtgtgaattttgaagaaattattagaatatcagtctaatttagctttagtgtaaatttcttattggttatagtaaatttcttattggttatacttaaagtgatgtgttatgtgtgtgtcccaaaaaatatttccttacccttagtgtcattaaatattttttgtataaaaaatatatttgttttgataaatttcagctaattaataacaagaaattatcataaattcataattctacaaacaaaaaagagcaaattacaataatattttacccatcttaaaattactggttaaaaaacttaataaataaattatttaattagaaaaacacctgaccatgtattagtaaacattttacgttatattattaatttttttttttaaaaaatcttctttattttctttaactaggaaaagt

SEQ ID NO: 4882 - DNA, 910 bp, Glycine max
tggctggcccataccattcgctccaagaacaatcatcatcccattgtgtcccattgcacattggaccggtaagattttctccagatttgctaattttggcatctttcatattgtcatcatcgtagggaagcgttctgaatgttagcttcattgcacatcggactttgaaattatgaacagatagatccaatgtggagtaggccttcaatatcaaatggaaattaattattacaagcatagtgcagacatgaagtcaaaagtttacaaagatgtgctggctataagattaagtactggaaaaggttattgtgcatgcaaagtgtccaatcaacatatttggtaaagtaagccagaatatataaaagaaaaaaaaaacaataaatcacacaagtaactttcttagaaagctcgcaaaatattggcaattctttcgtgcaaatattaatgtaaaataacatcaatatagaaaactgttgcattggaaaaaaacttaggtgcaataccataagtagttttggtgttattctccaatcaaaattagttccatctcggtaatccaaaccaacatttaatgcacaggttactaaactgaaattccaattttgattaaagaaccacaccaaaagcaccaacagtacaccacctaagttgtgtccattttattatccttgttactgaataattattcattcattcatgcaaccaattggaaattacttatttcatctcacaatatccctccccctagggtaagagtttacactatatggtaaaccacttgaaccagagcactaaatgcatctgcttcagtttcaaagaagagaacaaaatattaaagcgcaaagcacgggaataccaaattaaaaatgatgtattcccacatcacaaaataaatagatattaaatttga

SEQ ID NO: 4883 - DNA, 762 bp, Glycine max
aacaacacacccttcagtcaatgcaataataatgtaatgggatacaagagaaatgcatctaaaacaaggtactggatagactgaacaaaacatctgaaaaatgaaactgttaaaacattgaaattaatgtctcaacaggaaatttgaccaatcaaaattgttgaattaagatcaaacggctcaaattttatcttggtaaatcaaaattagcccaaaagaatcagaactactttatataaattaaagttattttagcagttcattggattcccaagtgcattggcacattatttacagtagtagctagcattaagttcagtttagagaaaaccacatcaacctagtagtcacatttctaagcttagaactaagttttaaacaagttatgccagtaaaccagttttttctttttaaaacacagaattttataaagaaacaaggttgactttaaaaggcttaaaattaaaaaccaggttatttttttattttcccaaaaaaaaaaaggggggggaaacccttttaattttccccaaaacttgtgacccccccagagtgtggaaaaacccgggcctttttttttaatcctggggaaaaaactaattttccggggggggggggaagaattttctcccctcccccggcgcgttgggggaaaaccttggtttttttcccccccccaagggggtttcccccccccccacaggaaaaagattgtctttttttttcccccggccgggggtgttttttaaaaaataacccccc

SEQ ID NO: 4884 - DNA, 659 bp, Glycine max
aacaacacacccttcagtcaatgcaataataatgttatgggatacaagagaaatgcatctaaaacaaggtactggatagactgaacaaaacatcagaaaaatgaaaccgttaaaacgttgaaattaatgtctcaacaggaaatttgaccaatcaaaattgttgaattaagatcaaacggctcaaattttatcttggtaaatcaaaattagcccaaaagaatcagaactactttatataaattaaagttattttagcagttcattggattcccaagtgcattggcacattatttacagtagtagctagcattaagttcagtttagagaaaaccacatcaacctagtagtcacatttctaagcttagaactaagttttaaacaagttatgcaggtaaaccagttttccattttaaaacaagaatcttataaagaagcaagttgacataaaaagctaaaattaaagacaagttaatttctatatgcagaaataagaagggtggaaaccttaagattcagcaaaacatgaagcaccaagagtgagagactgatgcttctataatcatgaaaagactaaatcaaggaaggtgaaaagttacctccagagcagatggaaacaatgtcattcccccaatgatgcttcacccaataagatatgcact

SEQ ID NO: 4885 - DNA, 722 bp, Glycine max
gcctgcagcataacatgtttgaatttgtgactggcattaagcattttgtgatatccaatccggttaactattcggcaccttcgaaggttttgatgactccctcgccgtatgcagagaagttcttgagcttgaaaacccgggttaggaaccgtgaatggagccagatttatgcagaggttgactcgattttgcgcgagcttgtgatcactcgtgaggatttggttgagaaggcaaaagggtttgccttcaaaggaatggatgtgtctcagcggattttcactagtagtagaactgtgcttggaagcagtacaaagtttatgttctccattgcgaattccataatctctggagccgcagaggttttcaattttgtgtctcagtcgatggtgtttatttgggttttgtattacctcatcacatcagagagtggtggagtgacagaacaagtgatgtgcatgcttccaatttcgaactccactagggacagatgtgttgaggttttggataaagctatttcaggagtccttttggccactgctgagattgcattttttcaagggtgtcttacttggcttttgtttaggttgaacaaaatacatttcttgtacatgtcaactgtgcttgcattcataagtcctctcctgccaatatttccatcttggcttgcaacaatcccagcagccttgcaactagtgctggaaggcagatacataatggccatt

SEQ ID NO: 4886 - DNA, 762 bp, Glycine max
catgcctgcagtaacaatgttatttgactttatttttctgttttgtggttgcagttttggggagatggtgagatcggttggattatgcaatattgattgtttcaggcccacagcgactcatgcataatgaagatggtggagcgtatatgcagagcttgtatttttctcattaattatttgattggctgcctttgccatggcctgcgtcatgccatggccttggaatgaggtagcctaccctggcctttaaccttttttgattcccccaatatatatatatgatcggttggtggggtgtctggggttaggtaaatgtttcattgtacccgatttgttttctaaagaaatagataggaaagtaatttaaccatgttagatcatgtaccgctaaaatcaccctcgagttcaagttaataatctaagtctttctggacatgctaacatagatgccttgagtttgattctattcttcgggtatggacgtatgaacatgtaatttgctctacagcagtaatagttttttttttttttccaattgaaacgagcttgtcaaattttttagtctcagtagtttgccataatgattttgcagtctgatgatacgttaccgcaggcgtacgtatcgttctaataatagaaactaaatgattggaaaaagatttagaaatttgattaaagagatcaagataaagcaatattttaaatgaataaaaataaattatgaggaaaacttccagcatttgagatttttcgcaccatggg

SEQ ID NO: 4887 - DNA, 693 bp, Glycine max
ttgcatgcctgcagacaattatcaactgctaaaaattatttaatacttaataaaaaacttcaccgagccagaaaatgaatcattacaaatgtactaaaataataataaaattaattttacattctcatttaaaagacaaaaattaacatggactaaaattacagacgaagttaaagaacaattttaattgatcaaacttcactattacaaaagtagccttccacatcgcaatatctatatcgattattaaaaagtcgatgtagtaaatgatgtgattgcatttttgtaattaatgtcaactatattacgcctttaacaatgatttttataaaatcatctttgatgtgtatgttacgaaggtgattttataaaaatcgtctttgttcatatatagattactgcgattgaggatatcacttgtctttgaaatcataccatttttattttatttattttcactttcaaaggtgcataccttgttgaacgtgagttctacaccttaagcttgttgctgaatgtgtgtttgcattttcacctcgttccctctcccgtgccataagctccattgtcacctcgttcccttcgtcgtgacctcgatagtgtgtcgcaagctccggcgtgacctcgataggagggttttaaccaccctctagctttagagctttatcaaatgtctctccaggttctgcatta

SEQ ID NO: 4888 - DNA, 768 bp, Glycine max
cagcttgcatgcctgcagaatgcaccaccaccgttaaacacatacatatataaatatataaaactttattgcaaagaaaagtaaaaatagattttcataatgaaatgtggaacaagtaacaaatttcactcaacaaaaatagatttatatttcactaccatatatcccctaatagtcctctgcattttgggacatctttttcttattgaatgaaggtaatcaatcattggtggtacacaaatttcataattcagcagcaggatatattatttatgttgaaactgcatattgatatttaagtcttacaaggagtacactataatgcatatagagaatgaactgtgagagaaacaataactgttagtaatgttctaatttctgaacttaaaattcatttgaatattcagaagcattattattgaagcaggatgcagagaagtggcaagaattctcctaggttagaaatgaagatcagaaaagaagccatacttcaacatctgtaaccacagatccatctgagagaatagcatgaattcttcccataacctaaaagcagaaacaaacagtcattaactcattatattatatcgcttcacacctgcaagagatgattgaaacctcacatatctatgcaccatataacatctatcaattagcaaataacccgtgagccttcatataataagaatcttcaaataaaacaaccaatttagtacgaagttgttaaaaaatttagtgaatgaaacaaaagtctagtaattgaactgc

SEQ ID NO: 4889 - DNA, 794 bp, Glycine max
ttctgcttctgcttctgtctcacgcatatcaaaaccccataacccaccattcctttcacttccacaccccaacactctcaaattccataaccaaccttctcataatccacgcaacaacgttcttctgccacttccctcacggtctcaacgctgctacattcgagccataagtgacgcaactgtggaacctgaaatttctaagaaagaacaaaacgagtcacctaaagattggaagattaaaatgctctatgacggagattgccccctctgcatgcgcgaggttctcctttatagtttataacatgtgttgtttgttgcgcataattcttctcttttgagttttgaattttgattgagtgtttaatttgcatgttgttgttgtaatcaggtgaatatgctaagagagaggaataagagttacggcacaatcaagttcgttgatataggttctgatgattactctcccgaggagaatcaaggccttgactacgaaactgttagtcttcgctctatatatggtctatgcgaattatcacttctcatgtttaattttcttatgtttttattaagttgcatcattcataaattgtttttagttaacaagtttaacaattagtgtaaaagtttacataaattatatttagttatccgcaaactagtttgtcactaccaagagtctagctcagttggttgcgtgagttgttataaaatagtgtttgtctttgaatcccacagaataaataaaaactggtttgtgactgaagtgtaaactactctcacggtttattgagtga

SEQ ID NO: 4890 - DNA, 702 bp, Glycine max
taaaggaaaacatttttcaaattcttttagaaaaatgaatcgatcaatcccatcctttaaattcttttagtgccacatgcacagaggtgagtcgggtcaaactatctttgcaagtaattacaagttaacaatagcataaacaatacaaattctccaacttaacagaccaaattcttctttaattattcatgtacacattacattgcgcaatacacccccaagcaaacactaaagcattagaatccttatttttatcggttgaatcacgtgctgcaacaacttcaactgcaaaaccatgtaataaatcttaacaacttaattaccatgtccaacagcaggattaagagaagcatatttcagaagctccacgtcacgctcaaacctggccatgtcttgctcctccatgttcacgatggcttctatcccacccccatctctggtatccatcaaaacaatgctattcttcacgggacactcactagtggtgaaccacaccggtttcccccaaccaaaatccgcttcatacatcggaaacctgcaccaactcgcacaacaaaacatagttactatttgactctcctcatcatccgaaccaccaggctgtggttcgggaaccgaagcagcttgcttcagacactcggagatgaacgacatgtccttatcctcccctccaaatttcttcgcatacgtttcacaaaactc

SEQ ID NO: 4891 - DNA, 759 bp, Glycine max
  misc_feature (716)..(716): n is a, c, g, or t
  misc_feature (744)..(744): n is a, c, g, or t
attacctttttcccataactcagcttgcatttgcttcagctggaggacttgctggtcagaaggttgatgaggcagggaattctccaactcattcatctgcttctgaagctgatcgatcttaagacacaagtcaccaacattgtctttgctccagctcttcagcctttgtttgagaatcttaagcttacattttagagcaaatcccccccaccccaggggctgattctgaatccagcattcattcaccaccttgtgataatccttattattaagccagccgtcaaaaaccttaaaaggtttagggccccaatcaatactcttagatttcataatgataaggcaatgatcagaataattcctttcgaggttatgttgagagctgtctggccattttgaagtccatccatcaaagactacaactctgtccagtttgcttttgcatgacccattaggcctaacccaagtgaagggcttgcccgcacaaggaatatcctcaacctccatggcagcgagccagtcattaaattcagatataatagaaagcgctgaattaccacgattgctccccattctctcaaaggggtgcctgatgcaattaaaatccccaactagacaccagcacgggtcttgggattgcaacttcctactgatcaaatcctgccatagctgccttttacccacatatcacagggagcatacatattgaccacattatnctttgcatgtccgggaatccaaaccctncccacataatgaaac

SEQ ID NO: 4892 - DNA, 767 bp, Glycine max
agaaattgtgctgcttcatgaatccagttagcctcagctccaaagatcccaaattggctttttgcaaaattaatcttcaatccagatgccaattcaaaacccctcagcatagccttcaaagcaatgacattatcccatgaagcatgtcccacaaatactgtgtcatctgcatattgcagaatattggcatgctcattttgcttccctacctggaaacttctatacaggttcttggctgttgcaaccctcatcattccagtcaagcctccagccactatgttgaaaagcaagggggctagaggatccccttgtctcagacctctagtgggaacaaattcctttgtagggctgccatttactaggattgatatagtggcagattgcaaacaagcattgatccattttctccatgtaagattgaaacccctcctatccatcatgtaatccaggaatgaccatgaaacagaatcatatgccttctcgaagtccaccttaaataccaaagttggcttcttacatctttttgcttcctccacaacctcattgagaatcaaagttccatgaaggatatgtctatcctttatgaaagttgattgtctttcatcaataaggccaggcaccaccatcctcagtctatttgccaatagtttggctattattttatacatgcatcctataagggaatgggtctataatcattgaatgaatgaggttgattgatttgggattaaggccaaaagaacatgctgccttagggagctacatgc

SEQ ID NO: 4893 - DNA, 647 bp, Glycine max
ttttaaggatgggtgtgaatttgttaaatttgagaaggaaatgaaatggcgtgcattagcaattttgctctggttttaacatgaatatgcgttttgacatgatttgaactaattctttgctatttgttgatcttgtcttgagtgatgttgaggtattgttttaatctggatctttttacagcttagtgctggtttgaaccttttatgtgcatttgtaagtccaatacagaaaaacagaattcatctatatagaaatacaggattagcttggtgctttgtaagtgcttttatgtaacaaacatatactatacttttactatctatagatttgagaagttgcattttaacatattactgttgtagggaagcttgcacaggactaccattaatttataataatagaatcaaggatatttattattcttttctgaaaaagaagaatggctggtttgacttgaaaatttcatgttttactagatacacagattatagtttattcccaaaatatataatttaatcaattctatttttttttctcattacggtcctgaagcagacgtatggagtgctggtgttgttttgtacaccttattaagggggtgccccccttttgggcccagctatatatcacttatacttaattataa

SEQ ID NO: 4894 - DNA, 684 bp, Glycine max
aatcctcacgtgtccatgagtgatcttatcttcactgttggtcaaggtcgtaattgtaatttatggcttaaagatcccactgttggtaatgttttgtgcaagttgagccacatagaggtagactttcctcttttatcttttgaaacttaaaatgaactgagtaactaatggtccatctgctttccagctttattatgacagaatagtcatttctaaaaaaaaactattttaaatgtttgattaaagatattattgaaaataattaatttttgttcggttatggtagatgcttcctaaaaatatccccactgaagaaatttacagttgagcatttctatgtctttcaatattacttaccggttgttatttgggctctgtacagcgtggaggctcatctgttgcattacttgaaatcacagggggcaaaggttctattcaagttaatggcaagacatatcgaaagaatgcccgtctgattttaagtggaggtgatgaggtggtctttggttcttctggcaagcatgcttatgtatcctttacatatggttcacagggaagactttatctgtttccccttttagttcctgtttctctttccttcttttttttgcatgcatatgtggtcacttttacatatttcaaggatattagctagtcatgtgttctgtgtattcattataaatt

SEQ ID NO: 4895 - DNA, 648 bp, Glycine max
accagataacaatattcgtggagacactgatgagaggtcagaagcatattttccaaagcccatgcacttcaaatgaataaatgtagaagcaatcaaaacgctctttgttgtatcactgtataatacaaaacatcataagcaagtagccataaattaactcttatctatctcaacccagcaaaatagcagcaaagaatatcaacatagctacagttcacatgtagttcaggcagcataatcaagagataaaacaataacaagtaatggtattcaccttagataatatgggaaagtttcaaaagagacatcaatattcttagatttgagaattctctgttctaaactgtccctaaatgcttgtcgcctggttgatgccaatattgttggggtatcaacatctttaaggagctctcttaattcccttcgctcctccaatatcttggtaatgccacaacttaaatcaagttcaggacatgaaccagcaagcaagcgcagtaatggcctcaattcatatgtagcagcagtaaccttcctaacatcggcatccacattgatgtcgacttctgctgtgtcaagactaggattttcattaacagttttgtcagcagagcaaacttcagatgctacatcattggtggcatccttcat

SEQ ID NO: 4896 - DNA, 802 bp, Glycine max
atcctttaaagtcgacctgcagcgtgttctttggagcttatgctagaagaagattgtcattaattggggttgagtttaagaacaaagtccccctttttaatggagatgatatcctttttatccagctttagttggcttaattctgttagtctatgccacttgacttggataggagaggttttatatatcttacgttatgatggagaatctgtatatatgaaacattaactctttcctgttgttagtattcctcataacttaattggagatattactatatacgactttgctgtttcttgctgttctttaagagagttatttacgaggaatgctgtaggcttttaagttttaacgctgaatcaaacagatggaataaatttatcatcaaagatgttatgttaagatgatcgcgtgaaaatatttaaataaaagagaaagaaaaaagagaaaatagtaatgaagataaaaattcactcaattattatacatgcagtctttcttctgtactgcccaagagaaggagaaggaggacggtacttaccatcatccatccactccaacattataatatatatactattcactgacacattggagataattactatatattatatgaaaccaaatttgaacacacacatatatatatatatatatataaatatatgacaaattaacaggtagactatatataattgtgagacacaaaagaggtgcggtaataaaatgatggacagagacccttgattgattgatctagttcttggaatccaaagccataatggtgctaagattcattgga

SEQ ID NO: 4897 - DNA, 794 bp, Glycine max
aagcaaccagacgtagtttctgcaaccagcgaaatcccatatccaggagagctgcaacagcaaatgaatgacttacattttaatacaatatagctttcacttttctaccaaatatatttccaaaactcaaattaaatattcaacaatttccactgaatgaaaggaatcatactttcccgcctctggacctgatctgtgatcagagaaaatgtgcacatcagaaaccagcggattgatgattccacgggcagatttaatcatgctatattcaaactgaacagacactcttgttgaaaaagtagttcctctaattttcctcacaaaaccctcatcaatccaactaaccgcctgttagaaagaaaatacatataaggcattgaaaattttaaattaaccatcaaatcaaattatcaaaaatttagaaacttaccgttagattctgaacaactggaacagacaaaacaacttcaccaccaccattgggaggtaatccacgactctctactttaagctccaagtcttcaaatggaactccaaagcgcttcaatataggtaaagtagttgacttgaaggtatcaatagatggatctttagaatcatttgtaattcctgataaacaatattccaaacagttttaatttaaagtttcaaccaccacaatatcttcgtttttctatataagaagaaatgtataaataggaagtagaatacaattactatacctttgagcctaatagtaagggggctgtttggcaaacaaacataacacaatgagtggctccagaaaataccat

SEQ ID NO: 4898 - DNA, 798 bp, Glycine max
ttcaagttgtcacgagtttgagttgctgctcagaatgggggaaacgacatactagaggctgaagggaagctggagcttcaggcaacgccttcttctctctactctctcctccactcccattctcatcgaggacattcgcgccgacgagacatggcctggtctccgaaaccacgaaatttcactccttcgactcttcgaaaccgtctgcgacgattgccacgtcgaaatcaacgaaaccggtaaccattttcttaattattaatcatgtttagctgtttttttttttatcgacaaatgtttgttgttagttagttttatattagaatgttagcgagaggattcgaacccacgacctggggtgttcagacttcagaaaaactaaacttgatgaactgaactagactaaactatatatatataaaaaaaaaactaaactatttttagtaaaaactgaattgaattatttttctagttcagttttaataaaactatataattttaagagttcatgcaccaattcagttaagtgcactgctaaaagcaatttagtgcagttcatctgaactgttttttcactttagtggagttagtttggttggagcaaactatgattcccttaacggatggattattcattctatttgggttgggcaggtaccaaattaaagtacaaacctggaactattatggggtggcagacaacacagtgcacacgattgcggggtctcacgggccattggttattttctggaccactcattgcgctatgttttggttgccaaacagccccttactatt

SEQ ID NO: 4899 - DNA, 810 bp, Glycine max
  misc_feature (769)..(769): n is a, c, g, or t
gatgccatttattctactaaattggtttgtgcaatttttctcaacaagaatttttacaagtttgacactgttaagtaataaatctaaattgaaaagattttctgaaaaacccttaccaacacacaacaataacaataaaagtcagttacatgaattacaccttgttaattaaattttaggagatatattatttactataagattcatctcccttttcatgaaataaacacaccatgtattctactctcgtcactcatgtcttgagtggtcttctttctgtatgtcgaaatcattttaaccccctttttttttccatatctttcaattagtattgcaccaaatatctcttcgtgtacaattcttgcccacacaacatgaacacaccattattaagattttgagttaaaaaaattctatttatagattctttaggtgtccttttaattagagcacttgataacaacattgttttgttaaatattcctcagaagcactcttcaaaagcaaaagaactccacagagcaagcaatgatattgttcggtacgaagagaccaaatgggcagcagaatctgcaaaagctcaagcagaagctgagctttccaatgctaaacagacagtgaaagatcttttctctatgattggggaatctatctacaaggcaaaagccgaaatgcgagacatggcaccactaaagaaagtatgtgaaaccgagcaaggatgataatgagtattcacaagttatgaagagattggaacatgctaagcggngaattgttccaacttaagcttgatagttgggttctggtttt

SEQ ID NO: 4900 - DNA, 703 bp, Glycine max
gaaaaactattgatgtagaattttgtctcttggaaaaatttctgaattctacaagtttgtctataattttcttttatcgatgtgaatggtagtaaggcttgtgcaatttaagtttccaccgtgtgctgagcattggttatttagacattaacttattcttatttggtaaaataagaaatatattagagaaataaatgaaaggaaaaaccttagggctggttttgttttatttcttgtttgcacttttaattacaataatgtcattttgttttcattttgttttctatttttaaaggtttgtgtagaaaacagagaagacaactttttattgttttcaccatttcctatacaaacctttgaaaataagaaacaaggtgtcatttttgtaattaaaagggaaaacagaaaatgaaattagaatatattatttttgaaccaaacaagccttatcagaagaggaaaacttgaaggttaacagggtcttgaccacaaacatctagtgcttgtggaaatgaaaatagtgtacatttgctgtgatgtaggcttcttctcttaaaatgctgtcgttgtggtcttttgtcattatgggatccagaattgtctacgggttcatttttatttatcgcaatttttttgaactgattatgtgattatctttgaagtcataatcaaaatacaggagtgagagtcctgattacttgga

SEQ ID NO: 4901 - DNA, 688 bp, Glycine max
atgctatattctatgctggaacaggcaacttgctatgtaggtcagaggatagggtttttatatttgatctacagcagaggattgttctcggtgatcttcagaccccttttataaagtatgtagtctggtctaatgacatggaaagtgttgctcttctcagtaaacatgcgattgtcattgctagcaagaagcttgtgcaccaatgcacactccacgagactatccgagtaaaaagtggagcctgggatgacaatggcatttttatttacacaacattaaatcatataaaatattgcctccccaatggagatagtgggataattaaaacactggatgtcccaatttatattacaaaggttgttggaaacaccatcttctgcctgggtcgggatgggaaaaacaaggctataactgttgatgcaacagaatatatctttaagctttccttgttgaagaaaaaatatgaccatgtaatgagcatgataaggaattcacagctctgtgggcaggcaatgattgcttatctacaacagaaagggtttcctgaagttgccctccattttgtgaaagatgagagaatccgattcaatttggctttggagagtggcaacattcaaattgcagttgcatcagcaacagcaattgatgaaaaagatcactggtatcgactaggggttgaagctctccg

SEQ ID NO: 4902 - DNA, 842 bp, Glycine max
acatactctttcactatgataatcaattctttcacttcatcgacctccctccttgactcaacaacaatcaaaggaatggtatgaagaatattgacaaaagtgcgaagagcatcagtaaatttcccagcagttgttgacttgtaaccagctttgagtttttcatctaattgagacaatctgaaaggaagtgctggtgggcctctcacatttggactagatgactcagtccaacctctttcaacagcaattgatacaactggagcggatgaaaaggcacgcagataggaatgactgccagtatgtagatctaggaacatggatttcaagggggcaaagttccgtatcccgagttgcctgttcagtaatcttattgcagtatcaaaattgccagcagctacatgatcagctgcaagagatgatctctgaatccatatctggctaactgccatcccaggtgttggggccacaaaaactgaagatcgtgaactgacagaaacttttggtgtgtcagcttcagggggcagctctaaatcttccagctcccatccaccttcttcgtcatcatcttctgccacttctacaccatccaaaattgcagcaacatctccattttctaacccatctacatcaaccatgtcaagctcctcgacccaatcaccatcagcagcctcatactcttcatcatcagcatctcgatctgtattgttaaaatcaccttcaaatattcctcgcatgaccctaagaaggggccaatcaccaccacacaatacagggtagtggtggcatcaagagagattgtacttttccctcagcacagatggagcattatcccccattcagct

SEQ ID NO: 4903 - DNA, 1380 bp, Glycine max
tgcctgcaggccattggcgtggagcacaattcaactctggtagtgaatcctggtgaaggaatgagtaggaatatggaaaggaggaagaaaatgagagctgccaagaatcctgcaacagtttatgcaaactctgaggatgttgttgctgtggagaagaatggattgttccccaaaaagatggacaaccacatttatatggccattggtcggtttttgtatgatattggcgcaccttttgatgctgtgaactcggtcttttttcaagaaatggttgacgcaattgcttcaaaggggacgggttttgaacggccctcacatcatgaacttcggggttggatcctgaagaattctgtggaggaagtgaagaatgatatagatagatgcaagatgacttgggggaggactggctgttccattttggttgaccaatggacaacagaaactagtagaatactgataagttttttggcatattgtcctgaaggcctagtgtttttgaaatccttggatgctactgagattttaacttctcctgattttctgtatgacttgataaaacaagtagtagaagaagttggagctgggcaagtggtgcaagtgattacgtcgggtgaagaacagtatggtattgctggtagacggctgacggatacttttcctaccctttattggagcccttctgctgctcattgcattgatttgattcttgaagattttggaaatcttgagtggattagtgcagtaattgaacaagctagatccgtaacaagatttgtgtacaattacagtgcaattttgaatatggttaaaaggtataccttagggaatgatattgtggatccctctttctcacactttgcgactaactttaccacattgaaacggatggttgatcttaaacacaatttgcaggccttggtcacttctcaggagtgggcggattgcccatattcaaagcaaaccgcaggtcttgaaatgttagattgcttaagcaatcaaacattttggtcttcatgcgacatgattgtttgtctaacagctcctctcttaaaagttctgagaatagctggtagtgagatgagacctggaatgggatacgtttatgctggaatgtaccgggtaaaagaagcaattaaaaaagcacttggtaaaagggaggaatatatggtgtactggaatattatacatcatagatgggaaaggctgtggaatcatcctcttcatgctgctggattctaccttaatccaaagttcttctatagtattcaaggagatatactcggtcagattgtctctggaatgtttgactgcatagagagattggtacctgatacaagaatccaagataaaattatcaaagagataaacttatacaagtct

SEQ ID NO: 4904 - DNA, 882 bp, Glycine max
  misc_feature (781)..(781): n is a, c, g, or t
  misc_feature (810)..(810): n is a, c, g, or t
  misc_feature (837)..(837): n is a, c, g, or t
  misc_feature (857)..(857): n is a, c, g, or t
gcctgcagcgtaggttcttatgggaggcggatcggatcaacataagattgcatgggtcgggtgggacacagtgtgcctatcaaaagacaagggcgggttgggcattaaggatatcaataattttaacattgcattgcttggaaaatggaggtggcatctcatgcaacagaaaggaaaacaatgggctagagtggtggattccaagtatggaggatggcggggtttgaatgaagtagatagagtgggctctgaatcagtatggtggagagacttaaaaagggccctaattcactcacaacaggggcaacttattcagaatggtctgaagtggaaggtgggcagcggagacaaaattaaattttgggaggatagatggatatgtggggaggagtcattacagcagcagcaactcattcaacagatgggaagtcataaggataatggatgggagtggaattttacctggagaaggacgctgtttgaaaatgaaatagacctggctgtaagtttcctaaatgaggttcaacacaaggccattcagcaacaagaaattgatgtatggaagtggattagagaaccaacaggacagtactcggcacacaatgcttataatacactaatggagggagtagcagttggaagccaggaggattgttttgataaattatggagtttataggttcctagcagagtaacagtctttacatggaggctagtttccggaatagacttcccacaagacagatctacagcggagacaagtgtcgatcctaagaatgtnctgtccttttgggtagaaacgcagacgangatgctgctcatctattccttcactgnagcagaatccacccatttgnggggagtctatgtcatggctgaata

SEQ ID NO: 4905 - DNA, 1345 bp, Glycine max
aagtgtatgaactagaactcctgttttcctgcactgccgtctgtcctactccccaacccacatttgcatttccttgatctattccactccatcccaagtgtgtattctctaacccaagtctccaagtggtgtctatagccaggcccaaggttccaggggatggaacaatgggtgaattttctgagcctgaatcccattgattacctgaaacaccgttctttgtacccacctcaactttagaacttcttgaaggatgctccgcagaaattctttgatgatgatggtgatgtacatctgcttgccgtaatggttcctctgctgctgtcggctgagatggtaagtttaaatcaccagtagagctcagtgcatcacctttacccgcatcaagcattgggctaagctctgcaacaaaactgagacaatcatttttagaaccttcagttaaatcctcgccacatttcatgattgaagtgggagattccaagccaccaagtgactccattgcttccacttctgccaacagatctgaaacggattcatcaaaatcattgggctcaccaatgattgcctgccatgtagatgtattacatgctggaggggaaggaggattatgcaaatcaaatcccagcttatgtggtgatgtttttgtagctgaaacatgagctggtgtggtaactaagcaattggaagaactatttatatcagggtgtctccaggtctgtccagaagatgtattacaagctggaggggaaggaggattatgcaaatcaaatcccaggcttatgcggtgatgattttgtatcagaaacatgggctgatgtgttaaccaagcaattggaagaactatttacgttagggtgactccaggtctgtccagaagatgtattacatgctgccggaggggaaggaggattatgcaaatcaaatcccagcttatgcggtgatgtttttgtaccagaaacatgagctgacatggtaaccaagcaatcggaagaactatttacattagggtgtctccaggtctgtccagaagatttccctgaattctcttcactatctgattgcttctgataactatgcccactattactctgcccatcagatgtcctgatcgagccattatttctattttcggaatttcccacaatcccatggcctttccttaatttatcagaaggatcctcattcaatttctcaggaatggcagttggcagtagtgaagggtatacatgcagttggccatgccctccattgctcctaacaggttcgtctttgccatcagactgggtagaggtattatccacctgtggcttttgttccttgctctgttctataatttggccat

SEQ ID NO: 4906 - DNA, 843 bp, Glycine max
cttaatgcttaaatttttacttttacaggatgaagaagcgaagaaaccaggaatcagaagtgttctttcgcatgaatgcacttcaatctatttttccacaatctatcaagttggcacattccccactgtttgtggaagttcaagcttgggcaagagctcagaggcaaccttgtcaaatgagacaaggttgagacgatttttgtttccattcataacatttgacagatatgttatttcctgagcaaccacattcttttcaaatatttcaatccaaaattcatcatcttcgttgaggtttgatgatcttaatatatttactacattctccagtgttgctacattcctaccagcaccacagcccatggctgttgcagcacccactgcatttgcaattgccaatgtattaaccagtggcatattatgtataaaaccatagacaatagcagctacaaaactgtctccacatccgacagagtcaataacattcacctgataacattttagaaatccaattagttcatcacaaaaagatgaatcttgtcaaaggaaaaaaatagtcagacataagttcaataaatattattgtgagagacgagcatatttgaacaatcaataaagaaataacatcatatacctagagcataccaaacacttgagcttgactattcctttgaaattcatgtttgaatcattaaggggaaaaaatcttccagttgaaaaaaccacaagcaatgttcaggacattttgttttgaaatatggtctttcataaaaagtggttataggcttatagccttatcttttattaataatgtcgtcaactgaaattttcacctttaagcca

SEQ ID NO: 4907 - DNA, 801 bp, Glycine max
attttacttttgttagaagtccatttgttgtcaaactattggagtttgcatttttggtgagatttggcctggcaatatgcacagaagatattggttttctcttattccccccaaaaaaataatgtaatgcaaaataaaaatgtttttgtttctgctatttgtaggtagttttacaaactactttctaatttaatgacatctttgattttattgttttgcattacaggctgaggaattaactggcatagaagatccaatattggcagggcaggagtttctcaaaagagggatccgcacaaaatgggtgattgtaaaaatgggttctaagggttcgattcttataacagcatcgagtgtagcttgtgcacctgcattcaaggcattagctttctcattctgattttgttcattgcttctgttaaattctagcaattttgaaacaatatttttttttcagtttatatactgctattctgcttaacagtgctatgacccactttggtatttagtttcataggtattattggcttaaaggtgaaaatttcagttgacgacatattaatgaaaagataaggctataagcctataaccactttttatgaaagaccatatttcaaaacaaaatgtcctgaaacattgcttgtggtttcttcaactgggaagattttttccccttaatgattcaaacatgaatttcaaaggaatagtcaagctcaagtgttcggtatgctctacgcatatgatggtatttctttattgattggtcacatatgatcgtctctcacaatatatttattgaac

SEQ ID NO: 4908 - DNA, 696 bp, Glycine max
tcagaaagtaaatgataaacaaaaaccaaagttctctttgcaatttgcactcgtgcccctctcaagatatttatttataaaataaaacagacacagggaggggattagattagggaaagggatgtcgtcgattgtgaagaacagatactgggttctgaggcatggcaagagcattcccaacgagcgaggcatcatcgtttcctccatggtttgcttaaatccagtccaatcttaataatattattttcctagttattgaattgaatcgcattcgcaggagaacgggactcgccccgaattccaattggcctccgacggtgttcatcaagcacaactcgctgcacaatcattccaaaaggtacctcaactcattttcaatttcaatttcaattaaccacgccaccctgactgcgcttcgcaggaactagaggctaataatatcccgcttgctaatgtacgcatttgctactcccccttttcaagaacaacccataccgctaacgttgtttcaactctcttgaatctcccttttgatggaccccactgtaaggtaagcccttccaacaacttgcctcaattgattctcatttactaagcactaaacactatgcagcaggtcatccaagatcttcgagaacgctattttggtccttcttttgaactcctttcgcatgataaagtaagtcatcctccatg

SEQ ID NO: 4909 - DNA, 740 bp, Glycine max
acttgctgcctgcatattggccttcttgctgacaaacgtccagtctctgtgttgatatttatggaacaatgaacacggtgatcctttcctgctatattatgcccctgccattgagaacaaattaagctaacatatagtatgcatacataacctacaaacttcaatgcatacaaatctataatataccaacaacctccttttaagtttatgcagcaattggattaatcaagtgctctcaattccatcatctcttcctctagtacatatacaaaaactaaccttgactacgcttatattgcacttacaacactattaatgtcaatcacactaggtaagcaaagtatatatggctaacatgaaaatcaataaacacaaccagacaagggataaaaaacttcgtaccccattgcccagaggctcttcgctatgcgaaggtatgggggagggatattgtacgcagtcttacctttgcatatgcaaaagggctgtttccggattcgaacccagacaagggatattcaaaatatttttttaaaaaaagaataattacctgcaggggaaggatgaagttagagatcaaagaatcaattgaacagacttcacataaagcggcaattgcatggcatgcatctctcccttcttcctctgttggaaaacaagaaaaagctgttccgtaagtagatttatctatttcccacaggaaaaattcactttgagaaggatgtccatcttcatcatca

SEQ ID NO: 4910 - DNA, 1506 bp, Glycine max
tcttcattccagtctctttgcatgccaattggctcattgccataaagaagagtcaaagcattctcagccctggctgcatcacgtctgtggtctgctaacacatgaaaccaaattaagaatacatcaagtcagtctgaaattcacatgttagaaacctgattacaaggttcccctataagtccatgtcattataaaggtagcttctaaatcataaaacaacaacaaacaaacaaaacaaaagtcttttttttccttcaaggtaatagctacatgggtcaaatgactcagtatgctgggagtttctcttgtatatgatgaggatgggtttctgtcctaagtggattacatggatcgaaaaatgcctgaaatcagcttctatttctattctggtcaatgggagcccaacagctgagttcactcttcagtaaggtctcaggcaaggggacccactagccccttttctgttcaacattgttgctgagggactaactggtttgatgaggaaagcacaataaaggaatatatttgaaggctttaaagttgggagtaataatgtagacatcagtatattataatatgcagatgacacagtgttctttgggacaacatcgatggagaatgtcaaagcaatcaaggtgatgctgagatgttttgaattagtgttgggattgaagatcaagtttgctaaaagtagttttggggcgtttgggacgacagaaaaagtggattaacaatgctgccagctacttgaattgcagaagggtgcaaggcaccccttttctattggggtatcccctattgggggcaaacccaggggcatagtgagacattggatgcagtagttaaaaaatgtgagagaaaattgtcaaacggggaaagattgactttgataaagtcagtcttgaactcaatcccaattttctagtcttttttttttcagggtgtcgaagaaggtggcagacaggttggtaaagctacagaggtggttcttgtggggaggaaacccagatcagcagatcaccagggtgagctggggaacaatatgcatgccaaatatgaaggttggcaggatttgaggaagttcaactatgctttacttgggaaatggagttggaacttgtttcaccatcaaggtgagttgtgggcacaagttttgaattcaaaatacgaaggttggcaaaatttggatgagacaagaagatctaacaaagaatctatatggtggagggacctgagcttcatttgcaatcaagcggaggaagggagctggtttaatagcgacataaaatggaaaataggttctggttcaaaagtgttgttttggaaagatgcttggaaggaggagggagtgtcgctgaaggtgaagtatccaagactgtaccagatttctcaacaacaacattttttttttttttgctcagcaaaagtataagtagtattaaatgagtaccagaggtactaagcttacaaatattgatatcaagcactaggttccagatcagactt

SEQ ID NO: 4911 - DNA, 814 bp, Glycine max
aacacaaatcagttattacagatgtccgttttagacctaattcatctcagttggcgactgcttcacgtgataagtctgtgcggttatgggacacaaccaatgtaacatacttttcccagttttcctataaattatgtgtaacttatacatctggtgtataaaacttataactagattctagcttcttcaggccttgttccctgtgtttgacatttcattcattttttgcaattatattctacacattgcaatgaactaatttttttttctttctttcaattcagccaagcccgttgtgtgcaagaatatagtgggcattcatcagctataatgtctcttgatttccatcctaagaagactgaagttttctgcttctgtgatggtgaaaatgaaattcggtattggaatattaattcagccacctgcacccgtgtaactaaggttcgttgagtaagtgtgttcctctttgaatattttatcacatgtgtctaatatctttttttcttaacaattggttgtttcagggagctagtgcacaagtgaggtttcagcctagactagggcgtttcctggcagcagcttctgataaaggagtgtcaatttttgatgttgaatctgacacacaaatttacaccctccaggtaaaatctatacgcatatttgcttatgtataatttaatattgtaatataatctcttaaacaaaggtcattgatattgtataattataaagataaatttgaaacccatccttcataaattgatgggttgttcgtattatgaaaagttcatttcagctaatttctaaatatgga

SEQ ID NO: 4912 - DNA, 691 bp, Glycine max
agcacaaggaaaaaaaatatacattattgtcacataaataagaatgggatgtttttagagaaagagaagtgttgaaatgaggatagtttgcagtattacaattaaatgggtgcagttttttccatgggtctgatgcatgcagtccagaagtaaggtttttgaatccatgcattcattacaacagttaatgaacaaaagcttaccgaacttcctccaatcaccaacaaagttgaataacttggatgaaaaacacaggaatgcaattggctcccagtggagctgaactcatgaatgcattctcctcctgaggtcaaactccaaaccttcaccaaattaggactcacagatgccaaggcatcaccattcccatcccagcaaatatagctcaccggttcaggatgtccctacaatgacaaaatgatttgaagtttaaactgcaaaatccatcaaagatgcaaagctcaaaataaaaagaccatattgtagcataaggtaaccaatcttcagtcctgccatcaaattttctgattttcctagttaattttttttatcaatactattaattaaataattataacttaaacatggagactggataggacatcatcaaaaaatagaaagaggaagagagaatatggaacagactccatccattatttagaaaatagctgaaatgaaactttcataatac

SEQ ID NO: 4913 - DNA, 712 bp, Glycine max
ccaagtaagaaaaccaggcctcttactcataaaacttagaaaataagttaaaaaatatatatgaagctctggcatcatttttgttgaaagaaataaaattcctgccatgcattgtattaatctctaaaatcaagaaaccattttatgaatgtccatgaaatttgtaaagtccttccagttgatcaggaagcaacagtttgatatcagtttatcctaaattccatgataaaatgcatataattaccttctcattctaaaagaagacaaaacagggtattcataagaaattaaattgttctaccatggtcagcacacgaaaatcattagaccaaagtaaaaaggtttacggaagccttacacgcaaagccatcttttgaagtttattcattgcagagaactgcttcaggcgtgataaaacagcagaatcaagaggtttatctggtgcaatgttgtcatcaacaatccatgggtgacctggcacagaaaaccacaaagtgccacagctttgtaccctttccaataattgtgcaaatattcatacaaatcatgatagttgcttgcccaatataaaagttaagtagactcagagagtacttcgtgagctgtgagccttgtttttggattccgatcaagcatttttcgaattagatctttggcactgtctgaaatgctaggtcatggctcagactggaaatcaagtcttcatagcaaa

SEQ ID NO: 4914 - DNA, 809 bp, Glycine max
  misc_feature (722)..(722): n is a, c, g, or t
aaatagactgctcatacacctgcatgaaatcagcacaaaggcataggattaaaattctatcaagtgaaaatcatgtgttgtcactgattgcttattagagtgacatacttacaaatgcctcaatactacacatcacccccaacactaataagataaagacttatcttgtcaattattaagtaatgctgtgtattacagaaactgaaaataaggagctcattactctaagatgtgtaggcttaaaaagcatttttgcttctaattcgagatgacatttgcataacaagttatatagcttcttgagacattttccaaatctattcgagtaaataaatacaacaataatcttatctcactaagcaaggtctgttacatggattacatgatgatgtcattaagcttagttacaaactaaattaaattcttagggatattatgcatcatgagatctcttttaataatttcctttaatgtccttcctgatctccctccaccccttttcataggactaaaaatcatgtaatctagtctcttcaataaataaataactaaataaaatttatatattgaaatttgctgctacattaaatagtagcaacagcttaaactaccacataatggacaagaagaaacataagtctgaagtcttacctccctctcattacacatgggaatctgaactagaaccacgggatggttacacgcagatccttcaatatcantcaaccttgaggcatccccgtcaatcttaagcttaatcctcttgtattttatccaaagcacccaagcaaacatcatacggtccactg

SEQ ID NO: 4915 - DNA, 1274 bp, Glycine max
tgcatgcctgcagggtgggatgtccaatgaattatacaacactattgcccgtgtaactgatggaatttatgaaggtactgcccaggtttatttttctgtatttcttaatgatggttttgaattatattgtaatatcctgttttgctacaggcattgccattggtggagatgttttcccaggttccacactttctgaccatgttttgcggtttaacaacataccacaggtaaaatttcacttttatcttgggtactgtatataatatctgcaactcattaagaactgcaaatgatttggagtatgtcattttcttgtgaatgatcagtttgtatttacattaaacctcaggttaaaatgatggtagtacttggggaacttggtgggcgtgatgagtattctctagtggaagccctaaaacaagggaaagtgacgaaaccagttgttgcctgggttagcggaacctgtgcacgactcttcaaatctgaagtacaatttggtcatgctgtatgtcagtggcccaatatttttttactaattcgcagttatagcatttataataagggagccaaattcctgatgttcagtggcacttgtataaattagggagctaaaagtggtggtgagatggagtctgctcaagcaaagaatcaggcactaaaagaagctggagctgttgttcccacttcatttgaagcttttgaagacgcaataaaggaaacatttgacaaattggttagtttatcttgaaatttttcatctctctaactgataattttaccttgtccccaactccccatctcccaaagggagcaatgttttaaagaagtgtctttagtttttagttgcctagattagcttgaatatcatagttgttttttcttttgttaggttcaagaagggaacatcacaccttttaaagagtttactgcaccgccaatccctgaggaccttaacacagcaattaggagtggaaaagtacgtgctccaactcacattatttccaccatctctgatgacagaggtatgttgggatccttcgaatttataagttgtaacatggaactgaggtgtcctagacacatttggtagctaaattaaacttttcttccattatttttccaaaggtgaggagccatgctatgctggtgtaccaatgtctaccattattgaaaatggttatggtgtgggtgatgtaatctctcttttgtggttcaaacgcagccttccccgttactgtactcaatttattgaggtagactattcatactctagt

SEQ ID NO: 4916 - DNA, 1383 bp, Glycine max
  misc_feature (1351)..(1351): n is a, c, g, or t
  misc_feature (1362)..(1362): n is a, c, g, or t
ctgcgatgacccattgttgttccaattattgttacctccaccacttgctgaactccagctctgcttatttccagcttggttccagcttggatgctccttatctgcattcccctggttccaagcctgagatccattatcattagctccacttgctgaactccagctctgatttcttccacttccttggttccagctaggatgctccttatctgcatttccctggctccagctctgcctatccttgtcaccagtatcctggttccaagcctgagatccattactattcttccatccaccattatctgcccccttcttccagtcagagggcccatcctcaccagaatcccttctgttgttccaaccaccagattgatcgttccttcccctgcctcggcctccacgtcctccttctgatccccacctaccaccaaaaccttccccgtctgatctacctctaccaccaaagcctccttgttcccctcggccaccaaagcctccaagctcccctcgtccactgaaaccgccacgctctcctttaccccgaaaacctctacctctaaaaccccctctgtcagagccacctctaccccggtaaccacctctccagttcccaccacctactccatcagaattttcatttgaaccttcattaccatcatcgcttgaggcatttgcggtgttccagctgctattgcttctccaagtcgtgttttgattagcatcaccagatccagaaatgcaattatttttgttgccccagttagaatctgtatttccaggatccccagaactccaattagatttcttgttttcgttcccagcactccaagaggatttgttagagttccaattgctattaggatcagaaggctggttaccactgttcccagagttccaattgcttttcttgccctgattggcatcttgatttccaggatcactatgcccagaactccagctggaattcttgttttcatttccagtaccccatgaagatttgttattgacattggttccccagttggaattttcattggaattaccagatccagaattccaattgctactttttggatcggaagccaggtttccactgtttccagagttccaattgcttttcttgtccaagttggaatcttgatttccaggctcattacgcccagaactccagtgagaattctggttctcattcccactcctagatccagagttccaattgcttttctgaccccaaccattactaccctgatttccactggaatcaccagatacatcgcatgaaccaaatttcttgtcgccccaattagaacctcttgggtgtgctcactcagccccccttccaaccagaagnttgactgaatnctgcaggcatgcaagtcaagg

SEQ ID NO: 4917 - DNA, 857 bp, Glycine max
ttcggactcgtacccgggctcctctaaatcgacctgcagatcaccactttagtttagagtgtgtgttaggggtcaccatatttgattttgcaaaagagcagagagagaaccataaatggtgtctttgctactctctgtattctgagccttttctaaagcatttctctgtttgatttttggattaggatgacacagctctctgaatgtacgtgaaggttcttgtagtgggagaaaaagtttggtgtggaatgagcaaaagttgaaaaagttccattgttgaaacatttgcagcactgtttatctcctgctctttgatgggtatgcagcttttgaagatcttgtttttatttatttgctctttttttattctttggggtttggatagtcgtttgagattataccaacttttctttattttgcaaaaaaattggacctttagtcaccaatgttgaaatgtcagtgcccggtttttaatttgcaaatgctaattcgttttcttgtaatcatttgttctgttgcgactttctaatggtgtctgtgattaatatgtggatatttctgagcgtgtttcgtgctcgtttccatattaggagcaagacccatttctgggctgcattaaagttacttccttttttgggtgatgacagagaaaattgaggaaaatataatgcactgtggagtgttttcctattctaagactttatcactcttcctgtcttgttaggtttttttataatatttgattcttggaatagggcgcctttttgcacaagagcatcaccttttttttttgtttctgttggatttgtggaatctcttcctcagaatttgtacactttttttttggttttggttgt

SEQ ID NO: 4918 - DNA, 743 bp, Glycine max
actggggacttaacaaagtctgagagagcagttgatgggatattcggatttgggcaacagggcatgtctgtcatttcccaactctcgttgcagggaatagcaccaagagtgttctcccattgcctgaaaggagataatagtggtgggggcgtattggttcttggtgaaattgtggagccaaacatagtttatagtccacttgttcaatcacagtacgttcatttgttagagtatgctacatttcaatttctttatatcgattatttatttgtggttttctcatgtgctatatacatgctgctcatcggctgaattctttggtaaatgtagtgctccttgatggatttaatgaaattttaatatgatatttatcctttagattatctatttgacttgaagatcaaaaattttggtcaagtgttgacttctgttgatcttttgtatgagatggaaaaagcaagctcataagttgatggtgcttcctgtcttagttcttaggaacctaataagtcaaataaataaaatcaatttataatatctagcacaccagttaggaatatgattgtgaaaatgttcacctgaagattatttggcactttgatggtttgtcactgttaccaattaacatctatagaactatggaatggatggagtgttttcaatatttgcatgtacttgggtgccctgcctcttggaaaggtgcccttgggtaaaggtcaaaagaattttcatttagggaatta

SEQ ID NO: 4919 - DNA, 1364 bp, Glycine max
aaaattcaagcaattcttccctcaccaaaatagaaactcaaatcacaattttgtattgaataataataataataatagtttacacatgaacaaatcaacgtttctttactaattatttctccaagaattaaattaagttcaaaccagacaaccagagtaaccaaacttatgtcgtaaacccatgtgtaaattgtaagcagataacattcaaaatgtgaacagaaaaaattgtagggagcatttctacatgatttttcagattaaaaacacgtaattgattcaaggccattgagctaaaggaatgtatattaaacaagaaggcgattgttgcacaagctgtacaaacaaccagagactaatattctatcctttcttgttgactcctaatacagacaaagtataataaaatcatgaaagccagccagagttactgaagtttacctttcattttccaaagaactaaaagcaaaaaacaccttatgtgaagtgggcatgggaagcccaaaaggcaatcaagttaaaaatcactcccttgtgtgatcattggagaggttcttagacttgagagtcctttcttttggcatgtataggtgtctcttcctctaaaaaagaaccaaagaagaaaaaaaaggtcaaactcctccattgttatgtctttgtccgctgagttggttaaaaatttatatgcaattgaacttatctgattccctcccaccactggggcagtgcttgactctgcccaaccgcttctcatagtgacacattcgagattgggggcagataccccaccaagataggaacaaagtttcaaaaaatcatttctttctcgtccactcaaggggtgaagacacctgcataacatgtgctatcaacaaccttttttttttttttttgctttcaagagaagaagaagaaacatcctaagaacttcatacttaacaatttatggccataaataaggaaatgtgagcatcagtgagagaaagtaccattcatggtaacatttcaggcacatgacatggtagtagtgaggcaacacaatcttactattcatctccatgcatattgcacattcttcttttctttcaatgtctatgtctgaagactgtatgtgcccctcaccatctcttctgtgatacctcctctactgaaaacattaaaattattttctctactctactttatgttagcttaaataaagacttttaaggctgtaggaatagtagaaggcaaaacgatgaaatatcaaattttgaaaaaagaaaccaggaagatccataatcttatagaaaattattctaactaatagttattttcttcatgaattctgcaggtcgatcctagaggataccccgggaaccgag

SEQ ID NO: 4920 - DNA, 1272 bp, Glycine max
tccttcatgaggctgctactcagaattcttccttgtgttcactgcaaacacaggaacttcccacagatgttgctttactgaacgtaattgatcaatttccaggggttttccaagcgagaatggggctgcctcctcgtcgtggccatgatcatggaatcacattgctgcctcacaccaaagcagtgagtgtgcacccatatcggtacgcttaccatcataaagacaaaattgagaaacaggtccaccaattgctggaagagggcgtcattcgtcattccataagtcctttttcaagcccagtgatattggtaaagaagaacgacaattcttggcgtatgtgtgttgactttcgggcttgaataaggctacagaggtggacaaatatccaattccgacgatccacaaacttttggatgagctccatggttccaccatattcaccaagatcgatctcacatcaggtttccatcaaattcgtatgaaggaagaggatgttcacaagaccaaattccgggcacatgacggccattacgaatatctcgtaatgcccctgccacctttcaatctaccatgtgtttcgtccatttttgcgcaagtttgtcttggtattttttgatgatattctggtatactgtcccaattggcaaactcatatgtctcatctcaccacagtgctcactgtcctctgcaataattgttttgtggccaaccgacagaagtgtaactttgggctcacctccatagactacttgggacatgtgatttcctcacatggtattcaaatggatccttcaaaggttcatgcggtgctcaaatggccaatcccacaaaccaccaagccagttcgcgggtttttgggtctcactggctactatcgctggttcatttgtgactatggtaagatatagcccaacccctcacaatccttactaagaaggagggatttttctggggagaccacagcgtttgagcagcttaagaagtgcttggcatcgttttcagtgctagctttgccggattttaccaaggagttcattattgagtgtgacgcgtttggacgtggcattggctcagtcttgatgcaagaaggaaagcccattgcatacttcagcaaggctctttctcccacaaatgtttctaaatctgtgtatgaaaaagaaattatggcccttgctttgtcaattcagaagtggcaacattatcttttgggtaggagcttcacgatctttactgaccatacaagcctttgccacttgctgcaggcatgcaagt

SEQ ID NO: 4921 - DNA, 780 bp, Glycine max
aggattttatgaacgggcttgggcttgggcttgggcttgggcttgagaggctgggctctatgtggagtagtgtagagatgaggaggaagacaagagaccaatttgatattcttgccattttctcgatttgatattcagtggggatttagatctacatttatagagggaggagcgtgtttgtgtgccctattttcttttaataacaattattttttatatcagcaaaatcttggtaattattagtgtgtattagtttttgttggtgggagaaatttaaatttaagatttctcttttcttgttttttctttcatcatggtaacaaatttaatattattgattaaattaaaataatcgcatgttaattgatttagatgtgttggtggtttgtatgggatatttagagaaaaaataaatgataattaggtcaaattgagttttgattcttttatttttatatggatgaatttagttattcaattttgtaaatttaatatttatttttttttaattttgtgatgattaaagatagtcactaaatattaaatataaacttgaaaaggaattaaatttatattttattttttaaaatttagagaagtaaaattatgagtataaaaatataaggattaaaatcaaatttaaataaaagtattaaaactaaaaatataattgtttgtataaataaataaataaataaaagtttttggcttgtgatgtatgtgggggtctaattaacaaaaatctagggaatttattattggggtttgggggtaaagaaa

SEQ ID NO: 4922 - DNA, 1581 bp, Glycine max
  misc_feature (1281)..(1281): n is a, c, g, or t
cacgcatgcatgaaaaatggaataaccttcctttgatactgtactacaatatagcatgaatcagaatctagaaaaaaagaagctcaaaacacagtagttattattattagtttattactattattattattatcataataatactgatgaagctaacaacaactcactacaatgttaggacttaataattaggtctaaatttcattaacattgcctctgattcttccccatcatcatcatcatctgttttttttagaaaggagtactaattaattaatggtacagaaattcaaaatccattgttggctccactcctagttacattattattctgatcttgatggaagtgatgttgatgttggtgttggtggtaccctcctcctggcaaagagctgctactctcacctatgtcaagttctggcctgtacacctcttcttgttccaactcttcctttgccactttctgcattcccatgatgaactccaatggccttcgttgttgttgctgggaattagatggcaagagtggttgttgttgtgttgttgttggtggcaccactgaggggagcttggagagaagtgcctcaaggctactcattgaaggagttatcttgagtggcaagttgaagtggccatggtgatcatatagttcagcttgttggggtgatgcaaggtggtgatggttgttgccgccttgataatgccattgttctggtgctccataccctcctccttctattttgtaggggtatgctgaagatgaagggtgtggcaacagcacaccagggatgctctcaatgtagctgaacttttttctcaaaagtaccacatagctcaggtcttcaatcaccttcagttccatcaaaacaaattagatataagattggtttagtggtgaaaaaaaagaaagaaataagaaaaaagtcgtaagttagaatctcttgccaataaaaactaacaatcccgacaactaatagttatcgattaaaaaaacttgtaaaataattttttgttaattgtgagagagagagaagaagagggagaaccttgtgaacagctcctaattgaacaacaccttctcttacagcaatgagagctatggtctgaaagatatataattgattaaattaatagagaaaggagattttgtatgaaaaccaaggggggtttgcatatatgagtgccatagtacctttataccagacaggaactgggcttcccaagtcctagggtgctgtaaaagagcatatataataaggatatatatatatatatatatanatacaggcagattttctttgggaagcatacataattaattaaacatgaaatcatgtcttttaattatgtgacatgaaattaatgactaatgaacttagatgattatgttaacaaacatttatttggcatttaacgctgcaagatatatgtggggttcttctttctcaccgaatctgctgaattgtgccatgctgtcaagaagttgatttcttgatcattaggctctttgtatatccacttgtggctgtgatctgcaggtcgatttagaggagccccgggtacgagtccgaatcgtataat

SEQ ID NO: 4923 - DNA, 807 bp, Glycine max
cccgtttatgcctaagagtccacctgcagatatgcacacgcatgcatgaaatattggaacaaccttcctttgatactactacaatgatatagcaagaatcagaagcatctagaaaaagaaccaacaaagctcaaaacgcagtagttattattattattattattattgttattattattatcatatataataatactgatgaagctaacaactcactacaatgttaggacttgataattaattaggactaattttcattaatattgccaatgatgattcttccccatcattcggtgtttttgttttagaacggagtactaattaatggtactgaaattcaaaatccattgttggctccactcctagttacattattattattattattctgaacttgatggaagtgatgctgatgatgatgttgatgttgatgttggtgttggtggtggtaccctacttctggcatggagctgctactctcacctatgtcaagttctggtctgtacacctcttcttccaactcttcctttgccactttctgcattcccatgaactccaatggcctttgtgatggcaagagtgattgttgttgttgtgttgatggtggcaccactgaggggagcttggagagaagtgcctcaaggctactcattgaaggagttatcttgagtggcaagttgaagtggcctgcatggtgatcatatagttcaacttgttggggtgatgatgaaaaggggtggtgtgggggggtttgtggctaattccatggaaaagctgccattgttctagtgctccataccctcctcc

SEQ ID NO: 4924 - DNA, 757 bp, Glycine max
  misc_feature (596)..(596): n is a, c, g, or t
tcctttaactttaatttttacaaaatcccaaaactaccctgcgctacctaattattatttggttattttatagaatgatggatctggaacacataaaaattggtggaacttccagaaaagcaaagcaagtgtgcgtgatgtttgctaacgtacacacttatttttattacaagtatgttagcaatctataactagagtttatcttaaaatatattaatggtatagtttgttaacacactcatgctataaaaaataagtatgtgttaacaaattcatatatataatgagaaaatcagttttatgtgaatgtacactatatcccttggattgtataattttttctattatttttaatgagatttaagccacttatggtgaattttaacttagtttgtcctcaaaaacatatttagaaaaatagacgagaaattattatctattttattttctgtcaaatttaattaggaatcttgaataattttcttatattctgatttttaggaaatgaataaattaaattgaagctataatgcatgaagaaaagagaacaaatggactgtccaaaagcataagatgacccttttgttgtctttggngtcttgtctcttattgattggacatccacgaagctcaaatagaaattgaggggagatgttattcgcacctccagattgctatatacacctccacccatgctttatattttgttttaaatacctctttttacgggaacattatttccccaccgaaatcatgc

SEQ ID NO: 4925 - DNA, 815 bp, Glycine max
tcagtaactgccctacaaaagcgtgctctattgcaaacaaaaattaaggattgtgaccgagatcaataaaatgtattgcaatcactgcaactagggagatgaaaatgggaaatatacagatacaaaatacaataggcatatcctacatgctaaaatcctttaaagatcaagactcgaatcctaactactatcatgaagcactggagttggcctacaatttaaaatcagttaaagaactccgtacactaggttccttttagtataatatttgtctctaaagcaatttcatggtagaaatcagttattaaagaatatatttccactcaatattatgcattatggttcttcaatatgggacttacatttctggatcaatttgaaggataaaggcagatatagcaaagataagatggaatcatggaagattgcaagttaaaatgcatgcgtgtatgcaataaaaaatgacacgtgatattataacttcagaactgctaatttgggacagacatctagcaaagcacttgaagtaatacacctcatgctgagtgatactgtgaaatggaaaatataaaggatactgaatcgatgcttcgttttggtcggcagatccatttatatcttttctcttctttgatgaggggggattgctttgaattttgtttccgtttattttttatgttgaataacaattgttctaaaagactggaaccagtcatgaagattgataagaactccatgctcttgagccagaaaataccctgtaaataaagaaaaaaagatactaacatcaactcacctacaagtagaaacttaaa

SEQ ID NO: 4926 - DNA, 1559 bp, Glycine max
actgaattgagttaacatgaaatcaccaggtaacataggtttgaattcatgactttgcttctttaacttacaaagaatcaaacccgtggattgacggaaatggtaattaaagggaatgaatgccacccaattgctattaacacaagattttgtaccttctataaattaaacaaaatcttatattgaaacagcatcaccaacttggattgatggcagtacgagagagtgagggacctaattgcattaagttgaaacctgttaaaagcttatatatactgagtaagagaaccataagcataaaaagaatgaaacctttttaatacataaaactagttttatgcaagacatcactagtgatgtgattacattgaaggaagaatcaacagaaacaggacagcacaatacacacacacacacacacacacacaaaaaaaaatcctatccatgcaattggtaaatcactagaatccaacaatatcaaaattaaaggctttaatcacattgatcagatcacgttaccaatgatatgaacaaaaaactaatgttgcaatggagcacccaggtctggacataaacaaaagacaatgatggacttcatctgatagtggattttaaactggttttaggggcttcatctgttgcttaaactagaccaatttttttactggacttcattcactcaaaaaacccatgaactaattgataagggaaaattgaaaggccatgaattggagaactttctaaaatctaataaaattaatcgcaactgacaccaatctattacatgcagtaacagaaactgtgaccaacatgcagccaaatgaacattgtttttgcccacaggcatcagaagatgaattgctttctcttaagcataatcccattactccatcaccagcatttctgcaacagaataaatgcaattaagcaacaaagttgaagatgggaggattataaatagcatggcatcaccactgcgacaacagccattcaatcaatgcatggctgcaatgcatgctttcaaatacattccagtagggagaaacttttgaaacccatgacctgaggttccagtgcctgccccaattggcagaaagatcatttgatattgacggcgagttcccagaatctaacattcaatattcagaagctataacgctgttaaacaacacaactaactatatgaaactcaagaacctaagacaactaagttggctctctaaaaaaagaaacatacacatcaacacaactaagtatatgaaactcaagaacctaagacaactaagtcggctctcaaaaaaaaacatacacattgagtaagtatactcttatacacattttgacaaagatgaagaatctaaaagtagtttctcaggagcagagctatctataatagaggactttatgctgaaagccaaaggaattttagtcatttaataagttcctttcaagtaaatagcctttctgcatctgtttcatatccaatgctctgctaaagggcaatactacatatgtatatatcacactgcaggtcgacttagaggttcccgggtacgagt

SEQ ID NO: 4927 - DNA, 805 bp, Glycine max
atcctctaggatcgacctgcagaattttaggacaaagacaggaaacatcttcagaatttttctaaaacaatttgcctctatataataaaggaaatagaattataggagtgaaattacacttttgtgtcacatgccaattttcctaaaagcttaagcctgttcggtgatagcctaggaatgattttatgtatctaaatatctaatctaacacaccctgtcaggtaagatccctttaaacttgaaccttgaataatacagaggcccattatacattgtattaacatttcaatttaattatgaagaccggggcagtaaggattgatcacttgatcataagatgcctttgatactatgtcaagaccaactctcctaaaagcttaagttgtaatgtggggacccaaaaatgattttatatatctaaacagcatctataaatctcatccactataataagtttaacattaagattaatatttgggctgcctttacatgttgaaaacacattgtgtagataaatctagaaataataaaatttccatatcttcaccaaagaggaaatacaaaggtatttaaagaatgaaccaagccttaaaaaaaggaaacagatcactcttaatcaaaaacatctgctacactttctcccaagtcctagttagtatcccccaattttcacctaattaatatcccttaatttttttacctacataaaatcattgacacgaagtatagatgtttgcggatacaacactcaccgatgtgaagtaaaagcgtgttcgcacatggcgctcaagtgtcttcacatttg

SEQ ID NO: 4928 - DNA, 1423 bp, Glycine max
  misc_feature (1396)..(1396): n is a, c, g, or t
aagttttgaaaccattgacgggaccaagctcttataacaagatatgttttagcaatagaagttttggcttggatgctgcccgtgttgctgaacccattctattatcagttaaggatcaattgaaagaggtagatctttcagatttcattgctggaagaccagaagcagaggctcttgaagtgatgactatattttcttctgccctggaaggtagtgttttgaggtatctgaacctgtcaaacaatgccatgggtgaaaagggggttagagcttttcggtcactcctaaaatcacaaattaacttggaggaactttatttgatgaatgatggtatatcagaggaagctgcaaaagcagtttctgaattgcttccttccactgagaagctgagggttcttcatttccataacaacatgactggggatgaaggggcaattgctattgctgaaattgtgaaacgttccccagctttggaagattttcggtgctcatctaccagagttggctctgatggtggagttgcccttgctgaagcacttggggattgtaagcatttgaggaagcttgacttgcgtgacaacatgtttggtgaagaagctggagttgctctaagtaaagttgtacctgcatttacagatcttacagagatatacctcagttatttgaacttggaggatgatggtgcagaagcccttggctaatgccctgcaaggaatctgcatcatcactggaaattttggatttggctgggaatgacattactgcaaaagctgctgcttctgtggctgcctgtatatcatcaaaacaattcctcaccaagttaaatttatctgagaatgaactgaaggatgaaggtgttgttttgatcagcaaggcactggaaggaggtcatggccaattaattgaagttgatttgagcactaactcgatcacatggtcaggagctaagctggtggctgaagctgttgtgggaaaaccaggttttaagttgcttaacattaatgctaacttcatttctgatgaagggattgatgagttgaaaaatatattcaaaaactcacctgatatgctgggtcctttggatgagaataatcctgatggagaagacactgatgaggaggctgaagaagatgctgatcatgatgaattggaatcaaaactgaagggccttgggatttaggaagattcataggaacaaacatgcaacctttactcaagattaatctgtaggccatttaatattttcaacagacacacttgtttcaagcacaatagctagctttgatctttgtattttagatattctattccatgacccgacattttaaaagcataatagatgtatgctcttaatatatctggcaaaacaagaaatggtattagctgcaggtcgatntagaggtgccccgggtacgagtccgat

SEQ ID NO: 4929 - DNA, 1433 bp, Glycine max
atctttgcttattcctcactgctagaaacctcatgtagcagaagttgtggcactcaaatggccaatagagatgacaaaggatcagatatttgattcagttcaatatgagacagattgcaagagacttgttcatgcttggaatggtaaccattttcatgacagcagctatttctcaggtgttatccaagactgtgctcttttgataaatagaaggaactttcattcattatgttttgtaaatagaatagaaaataaggcacttgattgtttagtaagccttgccttctatgtccatgagaagtactggattaaggactatcctcaccaattacaaaatattgtgtctgataatgatgtacaaacccttgagcctttcttcttcttaaataattcatcatctctactttcaaaaaaaagaaaactttatccatagatgagagtagacaattaatatttaagatataccaagattcatttaaagaattaatttcttctaatagatatttttttatacacttaaacttgagattaaatccttaaccacatgctaaagaaataaaattactatgaactgtgtaagaccatgttcgtcttataacaaagtcaattaatgttaaaaaaagagaaataacttctcattacctgatatacttaaagatatatgtatcatatatgtaacttgctttggttcaattaaaaataccaagtcaatgaggcagtccaacaaccgtaaatactcctactttccatgtttccacagatttgaagcattcgttaattattattattaaacaaaaatagcctccaacaattggttcatttgtttaaatcagtcaaattccttgactttgtctcaaagggcctataaataccaatcttatgccctaacgttaccatcattcacatctcaatttcaacatcttctttcgagcatttcactgtctttaattaataacgttcatactaattctaccaacttgcgtcgccatgaagagacagagagatggagaagagaacatagatttgggaaattgtctactgttgctctctcatcccagagaaatcaaaccccaaaaacttttgggccctaaagaatttgagtgtatgacatgcaacctcaaattttcttcatttcaggccctcggtggccacagggccagccacaaaaagcccaaactatacgtgaaagaacagtgtaaaattctgatgttgaggaataagcccaaaaaacacgagtgctccatttgtggtagggaattcactttgggccaggcactgggtggacacatgaaaaagcacagaattgccgttgaccaagggctttcttcaataaacaaggttgttgtaaaagtaccggttcttaaaaggtcgaatagtaagagggttttgtgcttggacttgaacttgactcctgctgcaggcagacaggcatg

SEQ ID NO: 4930 - DNA, 850 bp, Glycine max
acaacgaagctcagctccggcggagcgatactatagagtcgacctgcagtatcatgtaaattatttattagtggtgactagtttgttttaattaggtttttctactatttgtttgtagtcttctttcttttatttggggggttcattaaattttgtcctagtgctagaaaaatgtgcaacattttaggactattagggatatcatgtgctgtttgttttattttggtccggtcctgcttgaaaacaacccgatgagtaggacatgctgctgccagtgcaaggcgatgacagactctttcacatggcctttaatttgctcaaattaaatggagccatgctccctgtaaaattcaatgctctagattctgttggctttactattggccaaatatgttcttttcacacatgttggtcacaatattcaatacttaagttcaacttcaattgtgtgctctgtaaactattttttttttcttctaacttctaattactagaatataatactctaaattactaggactatgttttaggcatctctattcaaacaattagttgttgcccaatatagcttttttgttgcattatgcttcagtcattcacattcctcaataaaatataagatgttgccaaatgctttgagcaggaaaaaaatcacacactccacttaaaagttagttccaacttccacacacgctccttacttacctctttacctgctgtttcttctttttttttcctcccctctttttttgggggttgggaaccagaactacagaagtgccaactacacctcttaaacttttatacctccatcgatctatggcagagcaaggggatttgtgggaccacg

SEQ ID NO: 4931 - DNA, 803 bp, Glycine max
gtgatgcaatcgcggagacctccgaaaccatgataatatggacgttgcggatcataatttgaaaccttgaatcatttgatacataatgttaatcaatagttttagtcatggttatgtatggaatgcaacatgtgaaatgtttggtatagggataacaagactcataagagaattatttttagatacatagacaaattaactttctttggtttgaaatttgatttgatgtggcagaacaatggcttctcatattgttggatacccccgcatgggccccaagagagagctgaagtttgcattggagtcattctgggatggaaagagcagtgccgatgatttgaagaaggtggcttctgatctcagggcgtccatttggaagcagatgattgatgctgggatcaagtacatccccagcaacactttctcatactacgatcaggtgcttgatactaccgccatgcttggcgccgttccacccagatatggatggaacggcgaagagataggatttgatacctttttctccatggccagaggtaatgcatctgtgcctgccatggagatgaccaagtggtttgacaccaactagtaagtggcaacttagattctgctgtattgattattactcctttcgttcctgattataagatcatttttattaattcatgcctcttaaaaaaagtagttagttaattatattaaatctgtcaattatttatactatcatggcaaaattacattttttcttatctttctggcacttaattgttccttattaatatttaaaaaaaaaatatttaagt

SEQ ID NO: 4932 - DNA, 715 bp, Glycine max
aaacggctccatttgttattggatgcatctcaggcctttcttggtgaatagttaggatcccccagttgtaggtttgaatcttaagtgactcctttttaaaacatgcaagagtttaagataagaaaaaattaccatatgtataccattagaataaatttcatcttaatttattattatgattttctttccatttttaactgatatcatcaatattttgtcttattacttatcaagtttgggacgattaattatgatattcttaggttttgtgtccttaaaaataaaggtgtaaagtttggagaaagtgttaggtgatatatatatgagacctataatgttaggtgtgaagtttggagaaattcttaggttctcttattaagattaatgtcatccaaatgagaacatataaggagaaaatgaattttaattaatacccttcaaattaatctcaagagtggcttgtccatcctttgtaagccattggcaataaggctcaaaatcatcataaaagcgattgctagtagcagcaccatttgcgtttagataaacttaagaaaaatatactccctttgtactatcttattgcatcagacttggcattagtctatatcgttaagtagtggggccatttgcgtttggtgccatggaaacacggttattaccagtcgcaaaaaccattttataaccttggaggaaaactatttgtttggaaaat

SEQ ID NO: 4933 - DNA, 829 bp, Glycine max
tcaattctacgcagcatgaaccctactcccctgcttgaaccatcttcatcatcatggtatgcataagcaaacccaccatgcctcgtcaaatccatccccgcagtctcatcatccctcgaaattctcaacagtttcatcttatgaagcccatagaacaacggcgccatggtcgccgtaacccacccgcacaccaccaatatctgaatcacctgcgccgccagcagcctccctccgccacccatcaaagccccgaacggccttccaccaccgtaaatctcctccacgtactctttcttcgcaaacaatcccgtgaagaaaaccccccacgctccgcacccgccgtgaagctgcgccgcctccaacggatcatcgtactctaccttcgcggcaagcttattaagcccaatcaaaacccacgccgccacaaacccacacacaatcgcggcccacggttccacaacggcacagcccgatgtaatggcagcgaacccgccaagcaggccgttacacacgtcaatcacgttccagtggccagccaataaccgcttgctgaacaacgtcgtcagagccgcagtgctcccagccaatgtcgtcgtgacagctgtcctccctatagcgctccattgaccataataccctccactttcataccccttggctattgtcagaaacgaaccagggttgaagccgtaccagccgaaccataacaaaaacgtaccaagcacaactaaagacgcgctggggccacgtaaagcaaccgaccggcccgaacggtcgaaccggcccgattctcgggccttcattaaagccccccacaggcccgctatcc

SEQ ID NO: 4934 - DNA, 903 bp, Glycine max
aaataaagaggaggaggctgcccacctatttttcagctgtagtaaaatccttcccctatggtgggagtcactgtcctgggttaacatcgcaacaacaatgccacaaaaccctcgggatcactacatgcaacatggaattagggctgctgagggaaagaagtacacaagatggaaatgctggtggattgctttaacatggactatttggcagcataggaataaaataattttccaaaatgcaacttttgatgaaaacaaaatgctggatgatgcagttcttttaatttggacgtggatcaaaaacatggaaaaggactttgcaatacattttaatcaatggtcatcaaatatcaaggatgggtttcgctcttagcagggaatgatgtgggtggcttatgtaacatattagttctgttccaagcttggtggttgtaaaaactggaaccagctaggttcataaacatttgtaactatagtaccactggtactaattttagatatatataattctatttttgctgagcaaaaaaaaaaaaaaaggtttcaatttaacatttctgaacctactttgtaaactaacaaatttcaatagctcgtaggattgttgacaacaagtttaagatagaactaataacaattttatgaccactgttcacaattaaatggcaaaagaatgaaaggtttctcaggagcctagttaaagaattcatttaaaaaaaaaaagtaaaattactccaccttcccctctttttttcaagcctcactagatgtgacccacgagcaaatcctcaaccactaactttacgctttaagtggcattaaatatgggcaaaagattttgaaatatccggattaaaagtcccttctattggttggaaccagaattgaagagggagaaaaaaa

SEQ ID NO: 4935 - DNA, 733 bp, Glycine max
aattaatgggatttgcagtaaatataatagccagagcatcttatataatagtatctacatgtagtagaatagaataacaaattccgctaatacacattgaaaagacagaaacacttcagttttaagtacctgtttcataaatgcaggaggttgagagttatttgtgtgagccaaattaggattaactgatccagaagtattcccttgtaattgctgagatggaaaaggtgatgatgatacaaaagcatttgcatttgcatttggcggagccaggattttctcgtttgggtcaatctgcgggcggacctgatttccaggaacaaaacctaactggggatttgtggaaaacattgaattctgggggaccatagcctgaggcacttggtttggaaacctaaacacggggcgggaactgggatgcataccatacggaaccccttgaggagggtttgacatttgcataggtaactgctgattcatattctgcataggataagggccacaaaactggccatttggcatactcatactcatattcatgttaggttgctgaagcatgttgagaatactttgtgctaaaaattgtccctggagtggagacaaattgagttgagcttgattctgcatgacttgtccctgaacaggaaacattgggattgttgtaattggcattgccaacacactgttttggggacctaaaccccccaccacatggggtttgcccctgtggatg

SEQ ID NO: 4936 - DNA, 833 bp, Glycine max
  misc_feature (659)..(659): n is a, c, g, or t
tttgtttttatttttattgagggagtgggctttctttcttttgggactttctcttccctcattttatgggttttattgaattatggaacaagaatgacaaaatagagattataaatgtagcggttaccatgagttcacaggtaacaggaaacttgggtgagttatgtttcttttattttaatcttaaccgttatattaatctaacgcttcatatttattgctggagaggatccagcgctctcttggattttcctttgccctagagaagttcattccgattgccgctcaagcattttggagcttcaaaatcaaatggggtttgcccaaacattcgattttctcggtaaagtcttcgtttttcgcttcttctcactctctacttgtcactgctgtggccaggttaagagttcttgaattctattacttactcttgttcacattccaaacctgagtttaattgacactttcttgagtttatgttcacatcatgtctaacaacaataccaactcctcgaatgctcctaatcctaacccccaacatttcttgcaaaacaatggtgtgggaatgccaccccagccacagttaggtgcaggccaaaacttgatgcccccttttatgcagcctcacatgaatgcagcacctttcatgaatgctgcanatcacaatcattttcccttgcataggcctcatatgggtcatcaacagggtcaaccccatgtggtgggggggtttaggtccccaaaacagtgttgttggcaatgccaattacaacaatccaatgttttcctgttcagggacaagtcatgcagaatcaagctcaactcaatttgtc

SEQ ID NO: 4937 - DNA, 780 bp, Glycine max
  misc_feature (597)..(597): n is a, c, g, or t
  misc_feature (705)..(705): n is a, c, g, or t
  misc_feature (752)..(752): n is a, c, g, or t
attgggagtcaggaggggattcatatggaaaaaatgcagtataatgtaagatgaataatagatcctgaaaatttgaagacataagtttcccaacctgttactcaaggtgccacctttggttgcctactgcctttataattttcttgtacaagctagactgaaaaatcctgttaagggtaactcagctgcttgtttgttcaatgtttgtttattaattgtataatgttaagtggatacgttaattggaaaatgggttgagaaaattgggtttggaaagttattcaaatgaagtatgagtattttctgaagtaattgttatttggttttgatttgctttgatgtatacgagtcatatttgatacatagaaaactgattaaaacatttatggtggcaaaagtgagaagttataaagatgcttatgaaagattcccttcgtgataaaatctagtacccaaaaatcaaacgtaaatcttgggttgtttatgttttgggtaaaatgatgcttgctatgatttcatgtaacttaatacttgcggaaaaagttaatacggttagtaaaaaatggataacaacctccaggtgaagttatatagatntggaataatttgaatatagatgcttgccctgttgaagttttaagaagctcaaaaagtaagtaacatgggcatatttaatttgattctaggacacgcgcatccagtggnttttgctgtgatcccgaactttagctacctgttggcattgttaatantctagactctagcagcatcatatggatg

SEQ ID NO: 4938 - DNA, 1378 bp, Glycine max
agcaatctttgcttctattcctaaactcttgaaactgttcccatgtaaaagtaactcaactcttaaagagaggattgatgccccttttcgattttaaaaacatttttgtggtggttgcaggatgctacaattgagcaacttctgcctattttcctttctcttttgaaagacgagtttcctgatgtcaggctaaatattatcagcaagcttgatcaagtgaaccaggtttgtggcttaaaattgaatattccttcagattgaccatgtacatttcaaacattattatttttcatatgctccctctattgaagcttatgatttacacatggattgcaggttattggtattgatttgttatctcagtctctgttgccagccatagtagaactagctgaggatcggcactggagagttcgacttgcaatcatagaatacatacccttattggcaagccagttgggtgttggtttttttgatgataagcttggagctctttgcatgcaatggctaaaggacaaggtttgtgaagcaactaaaatgatattcaaatttgttctactcttatttttgaagtctatgttatcaaaaacaagttattttatcttgtactaacatgttatataaatttcattaattattttaatttgtttatttggtaaataactgtttagttttaggcatgtttgaattagcttttttaattaaaaaaacatagcagaaatatatgaaaaagcttttaacagaaaagtgtttttgaatacagtataaattaatgcacatatttgcgtgcacttttgatttagttttacatatgtaaattgtgtaaacatgagtaaaaaataaacgaacaatgtcatttaaatttatttttatcatgttacgataattgattttagagagctagaagaccaatttaaaacaaatgttaaattgtagttattttcagtttaatatgcaattgcaattttgttggtggtttaggctgtagaaggactaaaaagaaaatgccactcaaagtttaataaaggtccctagtatcataattcataaagtttaaattgaatccttcatagactaagttggttataaaaaaatcttgtaaactcatttagtcaagaagctggctatgctttttttattattattattattattttggaggggcgggatcaatgcctttctgtttttttttttttttaaaatttttatttagagtaaatgtatcatattgactttttccaatgtaggtatactcaatccgtgatgcagccgctaataacatcaaacgcttggcagaagaatttggaccggattgggcaatgcagcacattattccccaggtttttatagcagatgaacttagtttcttgatgtatat

SEQ ID NO: 4939 - DNA, 740 bp, Glycine max
ataaagaacaggaaagtatgggtgatagtaccactgatggacagcaaacagtaagggtagattaaaactacttatcacataatcaacaggtgtaaaaatatgtaagggaaagatatgaaaaatatgctgttatacctgaacataggtgcgattaagttgttctagccaatcagtttttatggtcactttatcatcatgaaagacatggctgcttcttttcaggatagctgcaattgtgtatcccaaggccatcagccctccaagaaggcgcacgctgacctcaaaagtaattctaggtgatattatgaatggactatctgtcacccattcctgaaaacaataatgcactatcactatagagtttttgcagtaattttgcttctaactgcaaacttctcagcaaatttcaaactcaagaaggtaggtatagaaggatgttgaaagataagatctgcaaagccgtgagattgaaaattgaaatgtcaatactatcctccattgtgaaacaagggcttttcaaatatttgtcaaacttcttgaaacaaacttcatgtttcacgctttatccaatgttttttagaagcacatatgcatacacacaaaatgacacagcacaaccatagagataaaacaaaaaagagagaaagaaaagagaataacccacaaatcattggaaaaaagtgtcaaccaaagaaaagaaggttgtgagacaaacaacatactgagaggcagtaaaagga

SEQ ID NO: 4940 - DNA, 777 bp, Glycine max
agcatactgaaaccaaagaggaaacgtatgacatatttcttctaccccctggggaagaccctgaagcttgtcaatcatatctgagaatgagaaaccgtgatggaaagtacaatctcatgtttgaggttaggtgattgaaaactttttagattattatagttttattattttttgagagaatgtctagcaaggcataaaccttttttttgtgtggtgggattaggaacttatacaaaacttatttgaatttgaacttatgaaagaggcttatgaccttcttataagttctttttaacttatttcattaatcttcagggaaaaacttatcaaagttctttggtaaacttcatagtcaagcttatgaataagctcttattaaatatgcgcttaattaagctattcacccaaatgcatcctttgtctaattagctaatatgcatttattttatgccactgcttcactcatgataatgtgatattgtttacttagttaaaagtttattaaaaaccttctgcaaggaaaaacatagctaccacttcatggtattgtgacactcaatgataatgaataggaaaaaaaaactgataaaattttcatttttaaaaaagcttcaactcaaactttttttgtggtgtatataccctacacagcttctttgcaaattgagtcctttgtaattaatgaaacatctattcctactttgttcccttcttttactgccttcagtatgtttttttgtctcaaaccttcttctttggtgacgcttttttcaatga

SEQ ID NO: 4941 - DNA, 845 bp, Glycine max
  misc_feature (624)..(624): n is a, c, g, or t
  misc_feature (670)..(670): n is a, c, g, or t
  misc_feature (712)..(712): n is a, c, g, or t
  misc_feature (783)..(783): n is a, c, g, or t
actattccttttttcattatgctgaatatttgacagttttaattagctttttcttgtgtatatggcatatgatgttacccttggttttatctgataacattgagctataacaaacatatgaagaagcctggtttgcaatgcattaacaccacccgaaactttcctaatccattaagtttttgtgtaatgccagatgattatcagcctgtttgaatagcattaaacgcactttctcctttagattatagtagattaaaatgtgtacctaaattaatttcagtccgatcaaaacgtgttataatatgtaaaatttattttgataagaaacagacatgcgagttcaagatccacaagcacatatgacgctggaaagttactgatttaaaactccacatgataattgtgtcaaaagctggtgatttactatggatgagaatccctatcaaaatctatcgtgggcaatattagacttttgattagcatctccgccatagtagcaatgaatagggaagaaaagagctttgcaattgcaagtgaaatactttttatatacgcatcaaccttgggaattccttgaagacgccaaaaataccaattatttcatttccttttaccataacatgntgcattttatttaatttaagagagaaaggattatatagtataaatntatacagttattcaatcacaattcactaagataagtgaactnttcttcagtttttaaatttagattgaaatagatgtagctaaagttaacgcgcattgccattttgtcttgantagattaaatattaagacttgaattgaaaaaagaacagcggatttaatcccatatttcactg

SEQ ID NO: 4942 - DNA, 862 bp, Glycine max
cagtcgttgccttcgactctatcccattaggctcatcccggccaccaggagagactagtaaagtagaggcttggttggcttgcaaaatggcctcagaagtaggtgttctttggtaaaaggatttagagatccaagaacacttcacctcttgtggacctccagtttgctctatattaaaggaaggtgtcactccttcaacttgacttttttctccaggataatttcccactttagaggttaccctttctgtatttggcgcgacagccccgtcacctttcatggctccatttcttgtgctaccaattgaatctgccataactcctacagaaattttccttgtctggctagagggatggatattgctgccaaaactcctacaaccactcgttcgctcctgaatacatagttcaaatccatgaatatcttaactttttgtccctcaataatagaaacactgaaactaaaattataattggtcgtagccagcaataacagtgagaagggcattggaaagtaatggacaacatattatttcttattatcgggtgctttttgtaacgattattgggaagcttttcttcatcgtttttaacaaatctcttccaattttgttaatagcgttttttacaaaaaatatccgtaagtggagataaattaattagttaaataggaagagattaagaaaccagaatcataataataaaaattacaagcacaaattaataataaatataatatcactagttaaattaattaaaggtctaactagtcagaagtcagaacaaaggaaaagcccaactaactaccaggacaaattccgcagtgatcaacaaacaaaacctaacgaataattaccccgtga

SEQ ID NO: 4943 - DNA, 857 bp, Glycine max
  misc_feature (24)..(24): n is a, c, g, or t
  misc_feature (32)..(32): n is a, c, g, or t
tccgattcggactcgtacccgggntcctctangtcgcctgcagggcttgaaaccatggctttggtagagagagttgtggttttgttcatagtgatggcatttgtgcaggtttcatttgcagctgtatacaaggttggagactctgccggttggactacccttggcaccatagactacaggaaatgggctgcaaccaagaacttccaaattggtgacactatcagtaagttttctcactctaattgcttgcatggtctgtttatgttactatgtaattgtgttggtttttgttcattgttagcagatgagttcaaatcatcttgtaaaaatggagaagtcctagccttttgacaattctgcatcctattctcagaatgataagaaaacaaacagtttttcaaatcaattgagcatgttgcgattctttgattccttcttcttttttttctagctagaagagtgttaattgttgaagtataagtgtgaagtaaagtctcacatatgagtaaaagtgaaaaagttgagcatcatataagtgaggagaaaactcataaacctaagccttaaagttttaagttaaagtgtggtgtcaaatttccttatataattgttcatgactcattaatgaaaatctgtgacaatgaaaacaggaactaatcagaaaatgaaaacaaaaaaatctcatttaagtggtaatgaatttgattttaagcaaatctaaaaatacaaaaaggcaagaagtcaatacatcataaattttcagtatttttatttcatgaaaacaaaaacaagaagtcaagccaacatgttttgagaattctaatctttggaaaataaaacagttttcaaaaatgaaa

SEQ ID NO: 4944 - DNA, 759 bp, Glycine max
tcttgattttctccagttctgtaacctcaacagtttcagaatcaaattcgtgttgggcctctcattcttccttggcatctccataccacagtatttcgtagaatattttcatgtaaagcatcatcacggatgggtgagatatctgaacataaatcaatcaaacgatacataattgtgcctaggtgttgttcaaatatgattgtggtatacatgattctttgcgagtgattgtgatttcaatgaatttgcagttcaacgatatccttaacgtgttcttcatgtcgcatacgacggtggctgtgttggttgcgttcattttggacatcacactctcacgtgatgatgatgaagtccgtaaggacattggtttgcaatggtgggagaagttccgtgtatatagtgctgatggtcggaatgctgatttctataagttaccttgcagactcaatgagttcttccccgccctttaagcagcttcttttgttatattatagatgttcattttttaaccctttaagccaattcatcacctttttttttatctcaaaacaatttatatgtaatttcccataccattattgttttgactggagtaatgttggacaattggaataatttatttatttatatccttgatagtattacactattcattattgtatttgttgaaaaaaaatgatttagttagttttaatgaaagtggtcacaacgcatggatcagatcagaggctagtgctcattttaagaatacatgaaatc

SEQ ID NO: 4945 - DNA, 1388 bp, Glycine max
actttcactgatgttaataaaaaatccggccttaatttttggcgtattttcattattgtcaaagagtttatgagatgcaaatgtgtagatagagagatagattgcgactttggatgtcaacccttctaaccataatcaagttgaattaataataatgaaagaaatttgtttcttgcacaaggattgctgtcgtcttcgtaaatttaccaattatgcatttcaccatttgagactttagttgctgctaaattctaaatactgtgagtgcgtgacccaaagagtgtgcaaatgtagcctcagatactgaaaattcatgggccattgtacatgttacgaaaattaaaatcttgcacgcttatgacattactcaaatcgataaccttaaattgaatgaaaaaaaaaattaaaaaacaatgaattggggtgagagaggctcgaactctcgacctcaggataactcagaagctatgagacctacgcgctagccaactgcgccaccaccccttgttattagattgatcattattgatattattatattttcaaagaatgattgactgaaaaatgattcacttatccaattttaattttaagttattttttttttctgacttgcatctttattattattttatcattggggtgagttattttagtgtctaaaatggacagcgcataaggcactgctattagcccaagaacaaagtgacccacccaattcttactttgtaggcatgcccattttaaaatgtttttgggcgtaggaagggacatcagaattcacaacactggttcgggatcccaatttattctggccagaaaaaaaagaaaaagaagagaaaagtaaaaatgatctaactagttttgggcccttaaatccaatctaaagctcgcatcttgaacagttcactttttggaccatcggcatcctctcttctaattgcaaaccccccaaaaaaagacaaatcgaaattacgtttaacttcacaaaaatacaagaaaaaataagttatacactaataatataaataattttaggtggtcatccaattcaataataaattgttttgtattataaatcattgacttttataataattattgtaaaagttatacaaatcataatttctaattaattaacaatgtaaatttttttatattaataatatatggtcattaaattctaattacaaattgaattgagttttttttcacatatttaccgacaataccttgaagatgtgaaaaattagagcttttttatgtaaaaaaatagtagttaagattataattaaatacacacatatagataataatattttattttattatctaaagtgagtctctcatttcgaatattgtatttgttaaaaataagtgaaattaat

SEQ ID NO: 4946 - DNA, 785 bp, Glycine max
atgcctgcagcaaggtcatttatgaatttagagtctgcacctctaaccccggctccggaagctgcttccttgacatcatcaattccatcctggatctttctatgcctttcaagcaattggatatgtttctcttctaaatcagcatactgttctaaagttcgtgtatgaccttctatagccatttgcattgttttattcagttcctcagcacacttcctctcagtatctagttcctgcttcctcttttcagctagtgacctgctagcttcaagttcagctctcagtttttcagttagagaaatccacctgctttctgcctcggtccattgacttttttcctgtttaatttttactttggcactgtcttcagtcgattctggatttgcatttgcctcagtgctagcctctgttaaatctgaaatggcagtgaggtttgctgccaaactaggttcagatgaataagtaaattgcaatggaggatattgctttcttgtggatttggatgaagagtcaacataaaagtgaagctgatttcttaaactacatatctcttccatcaacacttccctctccccaaattggtaaaaattctgatactcttgtaactcatcttgtactctttttaactctatcttcatcttcagaacttctaaatgatgctcatggttctcctttaaaagctgttgaattttgatagcaggcaagtcctatataaacatgaaagaaagtaatcataaaaagaaaactttaaaataactcatttctaccctgttttcatgtgcagg

SEQ ID NO: 4947 - DNA, 652 bp, Glycine max
aaccatactttatagattttccagcaagagcatttaatccaaagacaaccttaaccctgaaatatacctattattggtgttaaagtcgttaaaaacacagttgccaaatcaacaagatgaatctatttagtcctaaacaaacacatgggtaacaagtcagaagggaaaactgattttaccctgctttttggaaaaagctgtttagctcatcccacctatacatcggtaagcacccttgagtgaaaccaaacatttcattcgcattcaaaacaaaaggagtacagggttgacgacaatcttcagttccatatatgaccttgtcttgcaaagtgccacctaatctaattttcaagggtgaaaaggctgaaaaaacattcaaaggcaaaatgagaaatgaagtaaattgctgtgaaaataatccagatataaaattccctcttaccttttactgcatttaacaaaattttgttgttgaggtcctgcatgagatgaaaattataagatgtaaattcattctgacctttaacaactgtatcagattctgaaagtttatgacaggaccagaaccttttattagtgtagggagggggagggtatacactattagtataatctcatcattactgggtcagaaaattataatttgaaaaaa

SEQ ID NO: 4948 - DNA, 1384 bp, Glycine max
tgcctgcaggagtttccaaaatggcatcttcaccttcagggtcttctaagagagctagaaccataagcagcacatcactcacagtgtcatgccttgttgatgggtgcaattcagatcttagcaattgtagagattaccataggcgccataaggtgtgtgaactccattccaagaccccagaggtcacaattgctggcctcaagcaaaggttctgccaacaatgtagcaggtttgcatcatatcatattgtatcatttttttttattatgttaatggttagttttttattagtaggagggattgaacatgtgacctttcttttttttttttttaaccacccaaccaatctcataactcctcctattaatgagagttttgttcttttgtttgtttgaaattgagttctagattgcttgtaagttgtagtttgtcctcttaattattgcttcttttttttgtttttgcatttgtgtcgtttgcattgcatccgtatccattattattcatgttagcttcactagtactcatacgcgaccatattactttattttggtttctgctccaaattagcatcttgacttagcgttctttagaagtagcaatttttttacactctagtgtttacttccttactgtgaattttctaaatatggaaatttttctttttattattttattaaaaaattaaaacatggaaacaagattaacctaatcaaatcaaggaaagagaatgtagtgcgagcaagagtatttgaaaaagattctccattagctaatttcttaaaccaaaaagaatctcaacacctacgaaacctcttctcactttaatttttttttccgatcacatcagtctcatgccaaaacaaaactagtttatgattaattcactttacaaatagtattctatatagttctaaacccttgtgtttatctttatactccacggatatacacgtatttaaaagttaaaaccagttccctttgctctacaggatattattagatagttaaggaacatcacatgtttatggtcttgactaatctttacgtaacatgtatatatgaaacttaatagggaccatgatggttccgaagcacctaataattttcctataataactgctatatatatatggagaagttgaaaatatccgagtgcatggaacacaattacagaagttgacatataatctgagagaatgacttgcctgtattgttctgttaatataccctgtgtatattgcttgtacttatggtaaatccatggtaaatatttttcacctctaattggtgttgtgaatttggttttatttgcttgaatatcctgaaacttttccttttggtaggttccattcgctggagcaatttgatgaaagaaaaagaa

SEQ ID NO: 4949 - DNA, 811 bp, Glycine max
attatttacactaagaccaatcaaagcagcaaccaaaaactttgatgcagtgaataaaattggcgaaggtggctttggttgtgtatacaaggtattttgatcttccattcttggctacctattccatcttatggttaatttatttgttacttgatttgaaatagaagacacacttcgtggtctctatatctccattcaattctaatttaacgcttacaatttaatcataatttctttaatgtattttgtactcattagcaagcatatataaccttcgtgggttaatgaaagagaaaaattatccacgtacatgatggttaaagtgtaatggagatttgttagaccaatcagcacttcagtagtttgatatgtgtacctgtgtaattctaatgcaagaaaaaaaatacaccttgttcatgatgcagggcctacaatcagatggtacaatgatagcagtaaagcagctttcttcaaaatctaaacaaggaaatcgtgagtttgtgaatgagatgggactgagtatctggacatgaacatcccaatcttgctaagctttatggatgttgtgtggagggcaaccagctaatactgatatatgagtacctggaaaacaattgtctatctcgcattctttttggtaagcttcatgatgaataaactttagccatacgtgccatttgaatcaaacatttgacataaccaactaactgattgtccttcacccaatcacatacagggagggatccccaacaaacaaaactagactggccaacaggaagaaaatttgtcttggcatagctaaagctttggc

SEQ ID NO: 4950 - DNA, 790 bp, Glycine max
gctgcctgcagatacattctccgctgggtattcattcttctcaactcaactccattcaacactttttccatcctacattcaatcgacacattatacatatattgaactccacagcttccgagaggcacacatcaatggtccagttttctcactccagaggaactcgtcctcatcctccaacgtgctggtatcaatgtacgtacgcaaaacgcattcataatttccactgttagggattaatcatcgcattcacatgaaacttaattctggttgcattgcacacacaggtggaggagatggccggaatcatgtataacccagtgacaggagggtggtctttatcagacgatatcagcgtaaatttcatcgcgttcggtaccaaataaaacaacaccgaatatcatagatagataaatagataagatccatgttactgttattactataattattattagtattgaatattgaaatttgttttgaatgctgaataataaacattgaagttataacagaaagaaataaaggttaagtgtggaatcagggagaggaggggcaaagtttcccgagagtgatagagctgcgtttggattgagtcaatggttgactgtgccatatctgaaactccggtgtgcaattaatctgggtgttccaatggtagggtgcttttccggacaagaggatcaaggaaccaggggtgaacaaaatgggaaccgaaagggaagtggagagggtaatgaattgcatgatgcattcatattcaaaggagagatggcgatgccgttgttga

SEQ ID NO: 4951 - DNA, 783 bp, Glycine max
gcatgcctgcaggccttggcattccagttgacagagaaattatctatccttgcagagagtaatgaaagagcaacagaggcaaggataggtggtggtggattggatctgcctctaaggcgcagagatggccaggactatgccgctgccgctgctggtagtggaacagcctcgtcaggtggtagatggcaagacctgtccctttctcagccaaggcaaagcagtgggcgtgcaggatatgttggtggtggtggaaggccaatggcattaggccaagggagtggctattccagggatcgatcgggacgaggatcaggtgctggctatcagagtggacgatatcaggggggttcagcattgaggggaccccatggcgatgtatctacacgcatggttagccttaagggtgttcgtgcttagagaagttcaaaattatcttctgtacgccagttttgataatttgactaaatgcactatagcatttctggttttcatttctgtaacattttacttatggattttgtctaaatttgcattgaaatgtatgatcggagcttgtggattttgtctggatttgttataatcggagcttgctttcattttacaccgatttccccctgggtttattctgtttgaatttgattaaccataacaagacaagtattaaaggtttataccagtttaggagaatgatcagatagagctagtacaaagatgccctcttgtcattaatctattttacatcaaatgaatggttccctaaatggggatgttcctgggaggcct

SEQ ID NO: 4952 - DNA, 1185 bp, Glycine max
gcatcatactttggatccatgggagtcagcaaacagtaatgaaggttttattttcagaaaaactgctgttctttatttttaattaattttggaatatttgtttgattagagtttccttttgagacacatgcagttttttattacactgaaagtttaagcactgcaattcagcactgatttttcggtgctgaataaatttggtatttaatttatagtgtttgataagtttctcactttaaatactgaatttgacttgacagtttgaggattgacttgagaaactttaaaatagacttatagaaattagacagaagtcctgtaaatttgattgagtgggagcactcaacatccttgatgtttaggggcttaaaagcataaataaattttatatttactcaaacagtgataaggaattgaactttttagtacaactctaatctttccagtgatacattaactcccataagtttgaatgatgttttaatgtttttcactatttccaacagattttatgcagtgcatggattgcagtaattattcataatacaaaatttcatttaatatccactgtaggattttgttttgtccaatttgtttcatttcattaaataatttcaataagtttgaagtgattaactatatttctttttatataattgaaaaagaggataggtatagcaagtcattgttcatgatcattgcatgtggaatacattcagaagaaattactttttatgtcgtttttgacgtagttcatcagaattcagaagtggtagaatattaagagagtccactttgttatttgatgtcaaattcattccagagttaactctctaatatatggctttattcaaagaattttgttggtgttaataaatctctttaataaatacaggaccagagactttatctggatcagagcacatgaaatctgtaagatcagttaccaaggtttgtagtcctgtgaatgactccactaaagtggctgaattaccgctgggcacagctttggaaaaatctacagctcctgtagatgatgatttcacacgtactggtacttctgatcacaatgaaaccactgctactgatagagattctgggcaactcataaggagtggtagcccaataagacttcttcaagattatgcttctgatgacacttcagataatgaagaagaaggcaat

SEQ ID NO: 4953 - DNA, 1265 bp, Glycine max
actctactgttgccaatcccgaggtgaaggagaatgaaacaacaactgaagggagccaacaaaagcagggtaatgggtttgagaagtacttgtactgcttttatacatttgcattgtcatgtttagtagttaaggtagttgaaggtgaaactgtctattgaggtgctacatggttttaacctcttgatgcaagaggtgttagttgccaaaaagtgggtgccttaccaatgagatgcttgaaaatcagaaagtgaaatcagtaaaacattgactatttttgcatgaaatcagtaaaatattgactatttttgcatgaaatttacacataagaagtacaaagaagtaaagaacataacgacaaaattgcattaaagaaaaacaaaaatgtcagaacataaaataaattataaacgaattaaaataaccacagatggttgtgaaacatatgtagttagagaaattacaaaattcaaatcaaccaaactcaaattgatgtgctgaatgcttcaaattgcatgttgttgtcactagttgggttgctgtcccagctcactgccactgctgtgtgcctttgtgaatactacttgtgaaaaccctaatcttgaaagaaatacagtgccatttatttggggtgggggggggggggggtagatgcccagccaactggtatgcagctgtttctaagccgcacactcatttttgaagtgaaagaagcctttatgtgtatctttgaagaaaaagcaatcctattttagtgcatctttgataatgatttttaattgtttaatcatggccaacctcatttaagtttgcattggtgcctttgtgtgatattttgggttgccttattaaagttgaaattgcaaccacaattataatttaaaaccatagtttgagtgtttttttggggaagtcccaaaattgaattctgatgcccattccgcaatttaaagttgaaattacaaccacaattactactccttgtccttgcttggtgtttgttgatttactgccgtagaagctgccatgtcatttgactagactaaataaaaaaattaatggcatgaatctcccctcataagttttgtggaagtaactgaatatgtcctatggttactaaaattctgtcacgttttcatgttccaattgaacactttccttttttattattctcaaagaagaattttttctttctttttaccaaacatatgtggatccaatcatgtcttctaattacatggtattattttcatatcattttctaa

SEQ ID NO: 4954 - DNA, 842 bp, Glycine max
  misc_feature (758)..(758): n is a, c, g, or t
  misc_feature (826)..(826): n is a, c, g, or t
ttacttgcatgcctgcagttctttgttttgtttatggtattaatttgatttattgtggttgcatttgtgtgcaattttccggaaatttagtggttgtggtgcgattcagaatgctttttaaatgtgtttggtttggttgtagtgattgggagagagtagaggaagattctcggaaggcaattcagttggacagcaattcagttaaggtttttgtgaccaatctcctagtgattttgtagttcctgctgtcgtatatgcgatcgctaataatttagcttctatggttggtttgagtataggctcattgtgaccaatctccttgtgatattgtagttccttttgttgtatacgcattggctaataagttagcttctatgattggttttgagtataggctcatttgatggtttaagatgtgggattttcttttgaattgagtgtgctgcacgtttagttgtgtgactgtgtcttcaccttgggatagatgtacttgtgcttggtggtttgtggcttgcaaaacttcatgacggccatagattcttgaaatatgatgtaagaagcctggattcttaaaaaatggctaagattggtgccggactcatatttgatagcaatacatgtgtggtaatattgtccatatttttgaacttttattgattgatgccattgggatatgactttgatactttgatagcaatatgcccccgatagtattttccatttccttttttttcctgaacttttattgatcggtgctngtaaatagaagaaactgagggatatttggtctaaaaactgtgtttagggtccacagtgaatgcatggntatataggataattac

SEQ ID NO: 4955 - DNA, 688 bp, Glycine max
agatgaagcaccgaacatggcctcgcgccttctcctccctcccttactccaaccgttccgaattctccgccgcacgctccacgcgcctctgtgcgcgtcctcctccgccgtcccctcccggcgtcggcggcgaattctcgtcgctcccctacgacgtgctggcgaagatcgccgcctccttcgacgaccccaatctccgcgcggcgtcgctggtgtgtcgcgcgtggtgcgaggcgctgcggccgctgcgggaggccatggtgctgctccgctgggggaagcgcttcaagcacggccgccgcggcgtccgccccaacgtcgacaaggccctagactccttcaccaaagccgccgtgcgcggctccgccctcgccatggtcgacgccggcctcatctactgggagcgaggcgagaagccgaaggccatggagttgtatcttaaggccgcggaactcggaaatccttctgctcagtgcaatttgggactttcctatctccaaggtttttcatttctttacattataccctaatttcatgtcccacatcgactagcaatatgaaaataaatagtgtatataattgcagggcaattctcgttgtgttgaagttttatgtttcatttccttcttcgtaggagagaatggaagggaatcttccttatcacatgcactttttttattctggctat

SEQ ID NO: 4956 - DNA, 1331 bp, Glycine max
gcatgcctgcagcagcctgacaaattctcaactttaattacaatggttctgaattctcaagcagcaagactaatggccaagtacaataatatactggacatgatagcttaagctgcactatttttcttgaatcagactatatatagaaaaagaaatattgcactgtatgaaacctgaaatggtaatgagcatgcagacacatcccatatcttgaatggctttgagaccaacttttctcgcaaactgagttcccagagggtaatttctccattatttgaaccaactgctcatttgaaatatatatcattagaagaagaaaaattcaagttatgctttgtcggtattttggcaaccaagatattagacatgaaaaaatcatgataaacaataccaagaagtaaggtatgatgagaaggatgaaaatccatgctcgtcacagaggatccttgatgcaatgtcatagtcacagttcttggtagatcatcaagagaccaagaggcttgtcgagccaagggataagaaaccttaaattatacaaataaataacactgacatgagtcacaagccattacaaagtcaaacaagagaaaaagatttggcatcataaaatatgtgagaacacggctgaattgaacagaaattcattcaaagttacctcctctacagaatgaccaggacgaagccttttcattagctgttcatgatcagcattctgataatcaatcatgccaggatttgcaaggaggtgttctagggacgtttcaagataggcactgtttaaaaaaaatgtaggttttaagccactacatcctcttgtgaaactattgaacaggtaatattttaattaatatcaagatattctcctgttcacctacgcaagtaaacacaattgcaactgttgataataagccttttcaaaagagtgtaaaaatctagagtgcatggcatgcaaatttcatggaaaaaatagggcagcaatgattattaaaaataatagcgtaactacaattttaaccttgattctgtgggacaggcatagttgatgccgtgacaacagctgcttggacagatgatgaagctgaggcattggccatccaaccagccaaagcattagcattggcagttgcagcagcagcaggtgggaagggctatacaaaataaaaaaaaaatcaaattattaactaatcaacatagttacaattatattatcaatcaattaaaaatcaagggctgataaaaaaaaaaaattaaaaatcaaggtaaccaattgttcaaaatgcaaggtatcttacaccatgagctccaagtgaagtataagcagcaggctttgc

SEQ ID NO: 4957 - DNA, 970 bp, Glycine max
ttgcatgcctgcagtgacaggtaaaaaaatgccttctttcccaatcttcattttccaaatccacaaatactcacccttttaaattatatatgttattactattagccatttaaataaagaaatgatccttgaaagttgaaactttattgttcaattttcatgaatgaacctcttgttatttcatgtgatactaccagttttagcttaaacatcattattatcatctgagatttagctagatttccataaatttctaattttattacacaaggattccatccatatgaaatgtgcttcataatataagtttcatcttgactcagaattcatgttccttgtttcttggttaggaaagtacatcgctatcaatgttttgttgaggaccaagaattgttatttaattatccaaaaggagaaaagaaaaaaatgtggggtgagtgagcatgcaggagtttccagagagaggagagttaaagagaatgcagagggagcaagagagggagaggaggcgcatccgagacaggcagaggagacaatcaatgactcaagaacaaagggaaagacatcttgcaaggcgccgcagaaattaccagcttcgaagacaaagagctgcaaatgctcaagttccatattctccttttcctcaacttcaaactctagaatcaagtgcaggtgaaactagtaccagtgatgagcttcaggtctcacttgtctacctttctagactaggagtgcttctcaagcctcaccagtacaagaacattcatttggatccaagtcttgaaggaattttgatgtcttccacttgcaataagagagactgccctattatgcggacacctcttgattagaaccactccagattgtcctgaccctaaaacgctctactgcttcatggggcaggaattaaaccattgataaaaggttccgggtggcggggaaaaatattttttttttaaaaagtttgttt

SEQ ID NO: 4958 - DNA, 842 bp, Glycine max
ctctatgggtggagaattttttgatctggcaaggcgcttcacacagttcaaacgcaaggattttggtgtgctacctaaattatttttagaacaatcaaattaactaataataaaggtggcaacaacatacttttttccactgaatattttcttggcatttctctttaataaaaacttacaactcaccaaaattaccgacggatacatcttgatcttccttagctatcaactctgctaccaactggtgagtaacagcaggatcatcatccattgaatgtgtcaggtttcgcgcaagacctttaatatgattcaggcgcatcctccttggtgaattggctggtttataaactagagtttccaacggaattgatgatcctattggttgcattacaccataaggaaaaaaaagaaccattaatttgtctaacttgaaaagaaaaaaggaatatatatgtatatatacatggtatcaactcaggtgagaagactttgttaatgtaaaaaataggaattgtaaatataaactattagatcagaaattgaatagtcaagattaagaatgcacgtaattttttaagtgatcatgtgaacatgattcttgtgtagttggctgatctagatttataaggagttgttcccgtattatatatgtgtgtacgttctctctctgattgtcaagtgtgaatgaacataacaaaaattcaccttcaagaactttggttccaaaattgaaatgtttcttgtacttgggttgagccttgagaaaggactccatagtctagaaaggtagaagaagtgagaccttgaagctcatcactggtactagcttcacctgcacttga

SEQ ID NO: 4959 - DNA, 783 bp, Glycine max
atatgtcgaaaattttatttttcactaagctgtgaatggttacagattttataaatttatgaaattatcttcatacattgtgtaaattggatctgttgcgagttgtaacaaatagtaaaaacccagaaatggcaagatcatgattaaaaagtttctttttctttgtctcctcactgcattcataatcataaccaagttttccagtagaactttcatccattttaggcctactctgcttttaattccaaaagtttgcagataaagatcacatcccatatgccactatgattgtaaaacacaaaaatgtacaggcgacttttattagtcatattttacacaaattcatcaaaatggataatgatcaactaatacaaggcaaaagtatgactccttttcattcacagactaaaaaacagataattaaactaatgaaacatcaaatggatatgatacctcaataggcattcataaaaaaaaaagaaaaaactctgtacattaaactgaccaaaaggaaatttgtcaaaatttataaatctcacattttattgaaaataacacttacagtcaccaaaataatttgcactaaaaaagtagtgtaagttacaaatctacacaagactagaaaacagaaacactactttgggtattgaagaatttggacatcagggagtacaaccataaaactaaaatgaccataaaattttcaatagatgttaaatggggttatttgatattgaatttcaatcaatcctcagattttaaaatacatacagagcgaccctg

SEQ ID NO: 4960 - DNA, 826 bp, Glycine max
tgcatgcctgcagcaaccccccctccaaattacaaaccaattttttttttttttaatgagaatgctaacataatgacttcttaattcttactaatttccaccaggtgctgtgcttgtctgaaagtttctataagcgtacgagagagttccacgtttcaaatggataactgatactatgcagctcacaaacagaactatattgccaacaatagatcctctagctagcccaaagagccgaaacaatgatcaatgtgatagtctacgggaatgatttattgtaccttttggtggagtgtgcgacttcaaaccacttaaatggccacttgtgttgccaactgaattgatgtctaaacccataggacgaactggattacccccttccaacactctcaggatctacaatcacattaaaaaaaacaaaaaaaactttctcaatatattaaaaaggaaatttgtcagttatgcaaccagcttctcaattatgcaaatcatacctttgacattgggggtcttgcatcaggatccacacgtagacacaacgaaacagcccgtgccatggcttgcaactgaagattaaattccactgactccttagaatcaaagcatggtttgagagaacgaacgttttgtaagatatgaccgggctctacatgcgtatgggatgaaaccattcagaagatacgagtgtccattgaactgttccaactcgctaattcttcgacctgttattaactctaataatacaattccaaatgcatatacatctactttatatgtaagggttccagcgtcaagatactccggtgcaagatacctagtttatggt

SEQ ID NO: 4961 - DNA, 815 bp, Glycine max
agacatcaaccatgattcccttctagtgagttcatgtggttgttggtggtgttgtgattgattagtctcattctttggtttgatggcaatgccttggattataagccctgtcttccacttgccaccttcatattcatacatagatatctctatgttgccaacatctttttcagatgccacaaactctcccactggaatctctatccaacactcccttaatttctcgtttaaattttccttgtgttgttgtttctttcctccaggaaggacaagtctaacatttattggaacttcccacccttgagctgaatctttcaacattacaataaatgacacttgatatagaattcctagtgaaagttttctagtgtcaaatttcccatgcacttctagccagcaaaccattttcagattaggtaactctatcatcgtgccactgtaacatagataaatagattgttttaatgaaagattgactggaatattgtgcaagatgaatatgtgcttaaattctaatacttaatttaatcacatatacatagaacgattttttttttttacgcaagaacaagttgttatttaaagtagaaaatgctagtgacttttatagatctacctatgagaacatattttttcttaggaaaaatctcattagcacgaattcgtactcaaaaaaatttacaaactctcgccacctttgatttcgtcaaaagctttattttaaaatttcttatttaaattcaatcagcataatttcaacgttggtttcgtataatatttcatgtaattaacttttttggtttatatatttttta

SEQ ID NO: 4962 - DNA, 1553 bp, Glycine max
  misc_feature (650)..(650): n is a, c, g, or t
  misc_feature (1414)..(1414): n is a, c, g, or t
aagatcagataagtgatcccctgtaacaacacacggcccatcacaacggaaacatgatggggactttcaccaactaaatgatgatggggattttcaatcagcaagaaactatcaagaggcagaaagcacttggagaatggtcacagaattaggcctgactacacgccactctcaaaaaaattatgttcagaagctgttggaattggagagcagagatgttgaagaggttgaaaggttgggaagcaggagactaaaccaatgaacattatttcatataatgttagagggttggggagggggataaagtggcctacaatccgtaggatggtcagggagaaccacatagatatgttatgtatacaggagacaaaaaaggagtgttgacaagtccatgtgcactgcattgtggggagatccagatatcagatgggaatcgcaaccttcggtcaattcggctggtggcattctatgtatatggaatgagaaaagtttcaaggtagaaagaagaacttcaggagctggattcataatgctgacaggaaacacagctagtacatgtaattaatatatactcaccatgtaatctccaagaaaaaaggtcattgtgggaaaacatttaacacctgaaaaatcaaaatcctgaaggctanttggtgtattttggggggatttcaataatataaggacagctgcagagagagtgggatcaagtcagagggggcagcatgagggaaacatccgggaatttaatgaatggataacggagttggaagttgaagaagcaccgtgggtggtgaagcggtttacttggtacagaccaaacggcagtgctaagagcaagctggataggtttttgatctctccagaatggttgtccaaatggtctgcttcatctcaatacactctcaagaggagcttttcagatcattgccctgtcatgctcaaatctcagagcattgattggggtcctaagccttttcgcattctagactgctggctcaaagatcagtccttcaagaagctggttcagcaaacctggtccaataataatcaaggagggtggggaggttgtgttaaaacagaaaattaaagctctcaaagtcagcatcaaggagtggaacaagacacattttggagatactttaagaaaatacatgcagatgtgtatggaacaaccccagctcatatacctgctgaacagaaaagagaagcagcaaagaattgggatatggcaaagagtttgagagtaacttgccaacttgaggaaggcacaatgatctcaaaactgatgtgtatggatgaaagggataaggaagaggctcaaaggttgggaatcagggaaggggatacatgcagatcatatcttataatgttagaggtttggggagggggggtgaaagtgggcagctatcangaaattagtaaaaaaagagtggatgatatgctgtgcttacaagaaactaagaaggaaacagtagataaggctatgtgccaagcattgtgggatgattggaattcagctgggaaatgcatcagcctgtattaatgcagaa

SEQ ID NO: 4963 - DNA, 1269 bp, Glycine max
atcctcttggatcgacctgcagaagttcacacccttggatcaataaggcataaaaacatagtgagacttttagggtgctacaacaatggaagaactagattgctcttgtttgattacatatgcaacgggagtttgtccggattgctccatgaaaatagtgtgttcttggattggaatgcaagatataagatcattctgggagcagctcatggattagaatatcttcatcatgattgtattcctccaatcattcatagagacattaaggctaacaacatcttggtaggtccacaatttgaagcttctcttgcagattttggccttgcaaaacttgttgcttcgtcagattattctggagcttctgcaatagttgcaggttcttatggatacatagctcctggtgagtatatataaatcacctttatattctcacttctcacacctagttcattttggaagtttccaattagaaacacattttattctcacataaaaaatgtgccaaaatagacatactccaaaaattagtctgttcatactttactgccagtcttttttattccttaatctttcttctaatagttcaatgaaatcagatttaaaatataccacttttagcatcttcttttcttcctcattttacattctgtccatttgtgttactatcctacctcattgagaaaaactattctgtactataaatacacccaagtaaactgcctttgtttttttttttttttaataaggttactttcgtaccaaagattcaatttaagtgtcacatgttttattggctgggtgtattacactgaaattaattaaaaattttctcttagttttgtgactgttgactaatcatgcattatctgactaattgcagaatatggatacagtttaaggatcacagagaagagtgatgtgtacagctttggtgtggtgctcattgaggtcttaacagggatggagccaattgacaacaggattccagaagggtcccacattgtcccttgggttatcagggaaatcagagagaagaaaacagaatttgcaccaattctggaccagaaactagcactgcaatgtggaacacaaatccctgagatgcttcaagtgctaggggtggctctcctctgtgtgaatcaatccccagaagaaagacctacaatgaaagatgtaacagcaatgctcaaggagatcagacatgaaagtgtggattttgattttgagaagtcagatcttctacacaaaagtgttgtcaccaatccaaaa

SEQ ID NO: 4964 - DNA, 1499 bp, Glycine max
tttgtacaaattgagtcttgagccatcagctcaactttgcatttagcaaaatttatgtagaagtatcagggaagaatttaattagcatatgccctgaataatttgatcgcaaaactttaaagagtcttccaagaagaacactgatcaaagcagagtacgggttcaagaaatccctccttctatcatcttctctctcaatttagaggcttcattaagatcacctattctacagtaaccagtgattagtatattataggtaacaacattgggaactaagcctttttgaggaagtttatggaaaagtctctgtgctctatccatatttcctactttgcacaacccatttattaacgcattatacgtagtaatatttgggataagacctctttccaccatctcatcccttaagttgaaagcaccacccacatcaccagcagccgaacaggcatgaattagggcaccatatgtgaaattatctggaagaaaccctctagacaacaaaattgacagaacacttcttgcttcatcaatcttcccagacttacaaagaccatagatagctatgttgtacacaatattgttgggaagagaattgcatatatcactcttatcaagagagtctgcaattctctgagcttctagacttatgaaatcattttttgacagacttatctgaacatttatgaactgtaagaagatcaaaaatccaccctccttgtcttaggatcccaggtgcttcattgattctatcatttcttataaagactgatgacttttttgctacagataactggattaggagagaaccccttttcaatcatctcaaaatataaagtcaaagctttgtccaacttctcttcattgcaccaaccagaaataagggtgccaaaggtaacagcatttggtgatagagctcttctcttcatctcaacaagaaggttagcaacatcactcgacttcctagacttaaaaagtccattaataagggaattgtacatttctatggaaggagaaattgtctgtctttccatcatatctttaattctaaaagcttcgacaacacagccaattttacaatatccatcactcaaagtcctatatgttatttcatctggtgagcatccaagttccttcatcctatcaaaaacagcctgtgcttccacgactttccccatcttacacaacccaccaatcatcgtattgaatgcaactgtgctcttactaaaaccccgacccaaaatctctttccaaagcttcatagccctgtcagaatctcccattttgaaaaggcaatcaagcagagtacaatagctgacctcatttggcaccacacctcgttgcaccatcaaatgccaaaggctcaaagcatccccataagaccccacatcagccagccctttgagaaccatattataggtcacaaccgacggatcaattccctcccgtatcatctcctcgcaaagcataaaagccttgcccatcctcccttcccgcaggca

SEQ ID NO: 4965 - DNA, 1423 bp, Glycine max
atgctccagtatccacaacctttcaccatcgtcaaaaagtagcatcgtgaatgtcaccgcatcaaactcatcgagaaggagaagcagggtggtttttggacccagtggtgcaggggtggttttgcagtggccacgaggctggagtcaggagcaacattgagttcagatttggccagagtgggatatgtgcagtgaggaggttgtgcgcagatctggtcggtgtgggggggtgtgcagtgcttttggcatttggtgagtggtggtggtacacaacaaggaggtggtcgcggtgatgatggctgcatgtgggggtgatgggttgggagagaaggtgaagggaagagggaagggtaagaaattcttttttctccttattttagaggacaatagcaataaggttatggtcaatatcaattcccaacataatttacacggaaatttctaaacttaaatataacaaatcttgtcatgtatatcataaataaaaacaatgttcagaactaaccggaccctcaatgcatagttttggctccagcacaacatctaaatccataaaatacaaccatatggtctgtacatataacacatcatcagagaagatgcagatttttaggtgtgcaagctggctttgactgatgtcgaattactaacgtcatgcctacaaccctctaaaaacacacaacatctaataagccgcaaggcaatcataaaatgctaagttttactgtaagattaaaaaaaaaacctactcaacaatagtacagacccgttatcctcggtgcaacacaacgaaattattctaactccaggaaattactaccagccaacaactaaagttacaaagcacttactgtgcacacctgactgtagaagaatcagattaccatagcaaggttatgggtggaggtatgaaggctttttctaagcaaccttaggccaagaagatctaggacggggattttattgtcgagatattggggccataggcattgatgagggctgattatagtaatttccatctgcgccctgaaaaccctgatatgtacccattggaggaggggtaaaagaagaaacaccattcagggaaggcccaacacccggataggctgccattgatggctgttgtgccacaccatagccatatgccatactactaatggatccggcagtctgcatgaattgcggcacagggtactgtgacattggtggtggtggtggcggcaaagggggaggtgatgaagagggtggaggtggtggttcgctgggagtagattgctggttggttgtgggtgcattgtgttgaatagactcagaaagtggaaagggaggaagtggttgctgaggattctgagatggtataaaagatggctgctggtcattctcgagcttggtcctcttctcagagtgatatgtgcaggcatac

SEQ ID NO: 4966 - DNA, 896 bp, Glycine max
tcggttacccggggaatcctctaaagatcgacctgcagctctccaaactagctgtctgcttcttttaggaatctcagagccatcagcatagaatatacccgaaattttcctcaaaccacctgctgcccataacagtcagtgattgtgctttaattcccatacaaatttaaattacttcaaaacaattggcaaatagttgtcagcaggtaggggaggacaggatggcaatcaaataaaactacatagcaggatttgtagatgcaactcaattatatcaatttcaagtttgatatacactatttcttgaactcctggtttttgacttgaaatctcatggtaaataaatattaattttatgtaatatttattgttttaatatattaatacattcaaaaattaacaatgatttataattatatttaaacaataaaattttaaagagaaaatgatcaattgggtgtgacttgggaaaaggttttctatttcttcatggttaatcaataattgattaaacatgcatcaaaccaatttagctaataatctacttccagttaggaatggtatacgatttacttaaagaataccttggcgggctccttttctgaccatggattttggcaaaacagctttctgaaatacagatttggtaaatttcccgccatgccaccatgcaaaattttcctgacaaccaccagctgtaactttattgatagataactgtttcttacgcctcccacaagttgcacgtttctgtgttgttccaagaatacatgcagcactttgcattgtagaaaatcagccaccaatcatccatcaacttaacccagtccccacaaaagcattgttcgaatgttctcctcagctgaaatgacaatttcttaacaatgaaataatta

SEQ ID NO: 4967 - DNA, 1409 bp, Glycine max
atagagaggcatggtaaatccttgtgggaaaaaaggaggtggtaatggtaccggggagttccacggtgctggattccaagggaaaggccaaggggcaccaggaaagtagggaacatgaggtgggaagggatgacaattctctatgacttgttcttgggacctattggtggtttcacctttcgttggctttgttgacgtgtcagaagatttattggaatcatcattcactttttctccagcaacataagcaaaaggaatttctagttcttctgagccattaaatccatttgttgtggaattgttcactgctttttcagcaaggttcaaaacagatgtcattgattcacacaagggtgtatcagacccaaatgcaaggagtgtggcattacagttcaaggaaggatgactgactccatttggcaagtccggctgagaactcaagagtgctgcttcaggaacagttatctgacgatactgagaagtaaaattcttgttcttcctgcgaccagcacccacaggaacattcctcatcactccaccggcagtccagtatctctgacaattcttgcagaaatggcggggttggttgacattgtaattattgtagtagcagaacttggtatccatgctattgcagcgggggcaaggcagtattttgtccggctttctcagtgttttatcttgggaattttcaccttgttcttgttcggtcttttttgaagttttcaatgtaagatcctccttcttggtagaggggttaatagacactttcccctggtcttgagacagtatcaagattggtcacttcatcttccttctcactctcagttgtttcctctcccattatgtcctgcattcatgaaaacagctgctgagtatgttgttattataaactaaaaagttagtataagaattatacattagtgtatgaaaaggatgactcataattttactgtgttagatttctgccttctgcaattacatatgtgtgtccaagtcaaacaaaataaatttaactaaaaataaaaattgaaacacagaaaaaaataatgttaatattgacaatgctgcatggaaagccagttcactgggattaggagaaaacaaattcagtaccacaagcatctaaggaaaaaaaaaacaaaatctccatcccttgtttaggacttgcagggcaatgtcaattatcaaaatcccaaaatgccgtggttcatcaacaaacatgttaatccaatatttcctcaaaaggttaaggttgaaaatattgccttccaactctagtcaatgacaggctaaaaccaagggaaatgagaataattgaaaaggcaaccaaacaggaacgttgtacagcaaaattgaataatattgaatttatttgaagaactatgagctgagtatctgcaggcaaa

SEQ ID NO: 4968 - DNA, 801 bp, Glycine max
gagaaaacaggggctttgaaatgagtttcaagtttcaaccctgcacccaataaatattcagaggcaaaatttggtcattacagatttccagtaagaggttttttacataatgtgaaaagttaattagaaagagtggtggcttaaggacagaaggattgttcacgttgggattgaccaaatgtgacaacatttgcttaaatttattcaatcagccaggtaacatgaaatccagaacaattgaatctgtcaactgcatttactttcagattgaattaacagaatcaacctgacatgaactctgtacatctccggcaatgggaaaatcaatttacagattaatcatttcccccctcagaaaaaaaaaaattgtctaagccaaataacccattttcaagctacatcatcatcaatgttatcatcaccagaaggaaatctgtcttatctctgataatgaaagcggccctgggctttgctgagcttgactcaacaagtccttcggaagataaattcaatgcagcagttccagatgaagatcctaacaaatgcctgcttggggcatcagctgaaggtgatgtggtgatattgtaagagaaaatttccattgggtggtcaaacttgcaacttgggccaaatttgcatatgccataacgagaatagaagacacacaaaggttctccctgtaagaaatgggacactgcctctatcagattgcactaattcaatcacacacacaagacccatcctacgtgaagagaaaaaaacccacaatatttgaagatcttcttttttcttcaattacca

SEQ ID NO: 4969 - DNA, 800 bp, Glycine max
atcctctggatcgacctgcagtagtaaatctggtgaaggatcatgttgtacctaataaaagaatgggaaaataaaaagcgttgatttatctgcatattcgtttttattttaaaaaaacaaaatattataaaagcacaagaagggaacaacctaatcacaagaagtgcttggtgttatttaaacaatcaaaatttagtctttataaattaacaaaatattatttatttaatttttttagaattcataggccaaaattaaattattttcttcgtcccatgataattgtcatcctaatttttttgcacagaccaagaaaaattattaaattaatgaaaaagaatacaaattttataaaattaatcctttaataatcactaattcattttaaatttttgttacccatcattaatatttaaataatattttaaattttaattatttaaaatatgcatttattccgtataacacacaagctaaaaaatacacatacagaaaatatgaatattctttgtataaaattaaaattctttgaaatttagacgtgcaattatgggataacattgattatgtatatagaatatgatattttcatcaaactttttgttttgcaaattaaatgagatattctaacttattttgccagtgttcacatatatatatgcctgctggttattgttgacatcaaaatacaaaaacataggtgcatgcatgctaatcataatcatatatttcattcttaacactaaaatttttcttgtgcatatttaacatccaaaaaatcaaacgctttgaccaaggtg

SEQ ID NO: 4970 - DNA, 1567 bp, Glycine max
  misc_feature (1485)..(1486): n is a, c, g, or t
tcgacctcggtacccgggcatctctaaatcgacctgcagagaatgttgtttctatacttgatgtggaaacacaagcatctcgatattcactaaaggttggtttgaatattttttttccaagtttcattgctggagttagggtaaatcctttgaattagatgtgccattattcttgagcctgtctgtacttgagtcacacactcctcatactatctgactacccaagtgtttttgctggagggaggtctaagaaaagaaacatttgttattctttatataagaatcaaatactttttatgaaattgtatttatttccaaaaacaactttatgctacctaagtgttttggtgacttcgacagtaatttatgttccttctctcctaacgtatttgattttaacacgataatagggacatacaaaatcaatacgttctgtgtgttgggatccttctggggagtttctggcatctgtcagtgaggactctgtcagagtttggactcttggatcagggagtgaaggggagtgtgttcacgagcttagctgtaatggcaacaagtttcactcgtgtgttttccatccaacatattcttcgctgttggtcgttggttgttaccaggcaagtctacgtatcctttccttatttgtttccttttgagtatatttggaatcacaaattttgggaatttatttgattcatgagtggaattctatgtttgaaatgttataatgtagaattgattttgaagtccttttcgattaagtttgtgtatttactatttagaaatccactcaaaattggttggatttgattcatttgatctgattttaattgtaattatttgaattgattatttcacactcttattagttaacccacccttacctattatggtaaatcaattcatcttttagatgacagtagggaagggctgaggatgtccttggtggagggagagaatcgtaggggtaggtggattgaagtcctacattgactagagatagtgtcatgatagaagcatacaactgaagaacaattatcaccttacaagttggttttgtagggttgagttagacccaaattcaaatgcattaattttgtcaacaatttgtattatttttccaaaattatgcttaaaattattgtaacttgtcattctcactcttttcacttaactgctttcaacttaatgtgtgttagccatcttttccaatcctttttatatataataatcaattattagaataaccttttcatgatgaaaccaaataagcaccaagagttcaccaaccattgcccttatggccctcattgtcagctccctttcaaatatatagatcattagtaattttcttatatacaaggtgcttcagtcattaataactcaattttgtttgtggttagttattattatgatgtggcagcttttggagctttgacctaattatattttactctctcgtgtcctcaacaaatagtaatagtnnttagccaatagtaattagccaattgcatccaatctatagttttactttgtaattttgacctgttacaattggtaccatgat

SEQ ID NO: 4971 - DNA, 674 bp, Glycine max
  misc_feature (660)..(660): n is a, c, g, or t
tgcacccattagaacgcaaaatcagttccaatttatcgtaatcgattagttaacatgttggttaaccgtattctgaaacacgggtaggtatttgactgaataggatcgtccagttactatagaacctatcactaaaatacccctactagggggaggtagggctaagcggagtgaaaaaggttttccatgagatgggaaatgaatttttgtattgctgaccccaaacacatttggctggtgttttgtatttttccttcccttttatttttctgttgttgaggtgggttggcatataggatgacacaactgcatagcttattctttggaagattctaatattgattccatcatgtttgtaggaccttgtcataaccattttggtcttttgggcatggactggttgcttatgcccactgttagtgtctgtgaacaatgtttagcaggcaaaggggtgccagtgcttttagtatattcaaatggaaacatccaggtgcgtcatctctgacagcaggtttacttcaggaagatccgccggagattgaattgtcttattatggaaagatccccagtccaggcagtgagagcccttcagggcttcttaatggtgaaagcctaaatgtagaaccaattgccgatttggatctcttctttgaaaggctntacagctactattg

SEQ ID NO: 4972 - DNA, 1279 bp, Glycine max
  misc_feature (573)..(573): n is a, c, g, or t
agcttaattgatctcaactactccccttctcaccattaatactattaaatagagagagatagctagggagagtcttccttcctttcttttttctcttaacaagtcactttccaactttcttttctcggtttagtgtttgggcatggaaataaccatgaaagtcagattttctttgtgctatttgctttgctagtaatggcttcctagccttattacgtttttgtttttgcccattttctttcttggcgctgaaagagatatgggtattattattgggagaaagagaaggtgctcctgttcagctcctcgtgaggaccatcatcttctccttctcactttctttgttgccatacttctacaaaaggctgtggttgaatccacgacgctaaattacacgaggcataggcaaaccagtacccttagacttgaaaggattagtaagcacttgaacaagatcaataagcctcatgtgctcaccatagaggtaacattattactattaatattatttatgtactatagttttcattgtacgttgatcagtggttgagattttaatggcccacataaatngttggtttttgcccttcttatattatatgtaacagtaagtattcttttgtattgcagagtccaagatggagatctttatagattgtattcacaaaaagaaaacaactgggctttagatcaccccccttttaaagaatcacaagatccaggtatatatatacatgtacatacaacaacctaattattttcacaacgtacctctttgctttccttgcactttactcatggcccaaaaaaatgttgtttggtttttctttaagttttgtattatttgatggatgtaatagaaaatgccaacggagatgccaaaagggatgaaagtgaagaaagaagagaatgataatagtactagtgaggtggcatggcaaatgtggcacctaaatgggacacggtgtcctaagggaacggttcccatacggcggagcacagtgcatgacgtgatgagagcaaagtctttgtatgactttggcaagaaacggtcacgagttgataccctctctcgccgccacgatgcacccgatattctcagcggcaatggccatgaggtgcgtgcgtacctataacattggatagatatacttcaaagttcaaatacactattgcaccttcccaatgaatataatgtttttttttcaagcgacaatgaatataatgctaatggctaggtatacacacacaaattaatacaagctgcaggcatgcaagt

SEQ ID NO: 4973 - DNA, 838 bp, Glycine max
  misc_feature (764)..(764): n is a, c, g, or t
  misc_feature (774)..(774): n is a, c, g, or t
  misc_feature (802)..(802): n is a, c, g, or t
tgcctgcagctaaaatgatacctatcttcaacttgtttgctggtggacctctaggctctggaaaacaatggtatttcactcagtttcttgctcttgtaagatattgctttgtagtaattcttagacactgtgtgatgggttttagtttgtcctaattttcttgtgtcacggtgcaaatgtgttatgagatgggttttagtttgtcttaatttctaggttgatgtcatagttgagttatttttattctttcgcgtacaggttctcctggattcatttggaagacattgtcaatttaatatatgaagcactatcaaatccatcttacaaaggtgaatttttcactcgcatatctccaaaaggaaattcatcaaaattcttaaaaaaagttgtaaatgaataatggacgattgaggttggatgtagcatagacttcttataataggattatccattttccacctattacattaattcctccagctgcaattacactaattccttttgagatatctaccacctactccacacatcgtcaaggcaatataatggatatatttcctttggttactttaatcgtgatgaacctattgcattatcatgaatcatgtttatgaattatgaatatttgtaataagtgttatcaatggaactgcaccaaatcctgtgcgattggcagaattgtgtgaccagctgggaaatgtcttgggtcgtccctcatggctgccagtacccggactttgcgctcaaggctgtcctgggagaangtgctactgngggtagtaataatctatggtgactttgntctcagtccacataacttactaacttttagcatgaa

SEQ ID NO: 4974 - DNA, 819 bp, Glycine max
aaaaaaaaatatattattctttttgtttataatttataatacgtacaagaacatcatgctctcactctggccagtcttttcctctcaaagatctaattaaactaaagaaaaggaaaatcaaaaacatcaatcataacaattcacccccgaaaacaaacattatcataacgagtgcaacacattcggcatttactaaacgataaattaatgtaagtcagtagactatagttactgcataaaacacactttgtccattttcaaacctcaactaaaagaaaatagtttttataatacttcgacctagcttgagttggtaatatttcttttctccgattgaaggatttttcatctttgtttaatttattgcaagatctggtgcatcaaatgtatcatgttttcttctgattgatgtactgctccctttcattctatttaggttaattttgctgttagaaatagcaagaggatttttttttttttcatgtgattgtctctgtaaatggctggaatatctcttacacttacttacttccttcaataaatgttttatttaccaatttttgtctgtacacaactagatattcgatctaaatctcttaatattttcagttaatgaaattacatgttttcaaaattaaacaaaaataaaattcctaccaattataaaattacaaacaatctagattaaaataaataaataaaacttaaaatgaaacaaatatatcttaaatacatatcaccatttgttggtaaaaaagaggcatcttaatttatgctgggagatgtccatattattccgtgtgataccattcttcaccg

SEQ ID NO: 4975 - DNA, 1401 bp, Glycine max
atttattgctatcatagcgtcattctctaattttatatgataattcattactcctaatttggaatttcagacactagtttgtgtactttcaacctcaaaacagaaaaaaaccaaaaagatattctggttacgtaacttagctagctagtggctatttctgagttttttcttataaatcagtgagcagctatctagcttaagtggtgacagtaactttatgttcccaacctcactactttttaaaagataggggcaattcagagaggtccctataatattagataatcagttcaagaaatctttgctaaattttcggtataaagaaaataaactaaatttcagggttgaaaaacatccagcataagcacaataccatttacttcacttatttagtcaacacaaccaggaggataaatatttaaagttttgaacagttcttacaaattatagtataacaatctctagtgattagtgaataagtatgccactgttttgaagtatattaggatagaatatcaaaatagatttgaaacataaaccattctacagaaccaacatcatcaaagaaatagatatgggggctaaatatgggggctctttgggttgcagttttggaggctaaatatgggggctggagaggtctaactgaagagggaagctcaagtttacagtcaatttggtggagggatttaaaaaaagttatccatcagtcacaccatggcaagactctacatcagcaaattaattggaaggtacaagctggggataaggtaagattttgggaggataggtggattagtcatgaccaatcattagctgaaaagtaccctcgggctttacatgaattctgctcaacaacaccagctgattggtctcttggggaagtatagtaactatgggtgggaatggaactttagttggagaagacagctgtttgacagtgaaattgaaatagccatctcttttctttctgaagttgaaggtaaatctatacatactcaaggttctgatagttgggtttgggcagcagacacgtcgggtatctactctactcgtagtgcttactcaacgttttgggaggaggcagctgttgagaaccttcatgaatgttttgaggacctatggaagatcaagattcctagtaaaattgcggttttcgcatggaggatgttgtgggacagactacctacaaaatctaatttaagggctagacaagtgcagattttggatatgacatgccccttttgcagaagggtggaggagaatgcatcccatatttttatccattgcattaagatccaacctatatggtgggaaacaatgtcttggataaatttgaagggtgcccatccatggagcataaaagatcatttcatgcagtattcttctctgcaggcagac

SEQ ID NO: 4976 - DNA, 676 bp, Glycine max
gccttagaatccacagtggaactaatccgaataaagcttgcatggtatagctccgagcttcttggcattgctgcccccgttttccgttcaccgtctaatgaggatgctcctccatgacacaggcttcttcagaccattgatcgtgctgcggttgtggacactatcaaacaagactttgaaagatcctattttgtcacaggttttccaacacccatttgcttaatttctctgggtctattccaatttctttcctttcattcataagagagataaattaaatttgatgcatcatgaatgataggttttatcaatagaattatagatttgtttttataggtcaggggtgataagaacaaattttaacacaactctgtttcacatttgaattctcaacacgtttgattggcaaagctttaacctcatgaaatcttaagcctgtgtgataagcacaaattttactgagattataagtgattgtcgcttatgttggcatgcgaattaagaatatttttttagcaagtgaaggtctatttggttgcagggctggcctaaagaaaattttgagggataattttttactttacccgtgtttggtatgcgagacagtgacaaattagagagaaagggtggatggaaaggtaaaattaattttaaaaatggtgagacctattatact

SEQ ID NO: 4977 - DNA, 823 bp, Glycine max
tgtgttctgtttggtcctcagaagctaaagctaacaaaccaaatggccctattgtgccacttcttgttgcatactcttcactacacagcaagtggggatcaacttcactttcatctagccactccacattctctagttcgggtagctcaaacaacacttctacatcggccttaaaaaagtcgagttttaaagaaaaaccatcattcatgttgtatttaaaaaaatttgacaaattacagaaccattttacttacctgtgatgcagtgatacctgagacttcaataattgatccaccaaccagtttctcccccaatatgctaatttgtttgtcgcgtagtttttctatttcttcaattggccactgcatcaactgcttcccactttcatcaagccaaacttgccttggaatacactgcatagtacatagccaagatcattcatcatccaacaacatatgaacttctaatctatgaatatatagccctaaaataatatttaaccaaaagggttatacactgactcggtaaaaagttttacagagtcatctaatcacatttcatcatgtatgatgataagtttgttaatttttaaaataattatagtataaaactattttaaagcaattcaaatgttgattgataattaaatgatagtataaaattattttacactgttagtactacataggcattaaactcatatataaatacctgtagaccagcccatcctttctcaatgtcattttgtctagtgtcacactcgttcacccacccccacatatcctcctgttcttagcatggtcaaaaaatgactttgaagcat

SEQ ID NO: 4978 - DNA, 764 bp, Glycine max
  misc_feature (721)..(721): n is a, c, g, or t
ttatgtttgtgtttaaaacaaattgagtaacttccataagtcacaaagcgtgaattagtagtggcatatgattttatatttaaaacaaactgaatagcttccataatttcttaatttcctaattaatacatgagcggttgcacatgagtgttggtgggaaagataatatatgataatttcctaattaatttaggggcaagatcgttaaacaaaatgtgtatatcaaaagagaggatatatcatttatatattgttatagattaaattaattaatcaaaatcattaataatataactaaataatatttttcctgatgtttatcgatcttatcttcattataacgagattttgaattccatgaaaaattattatctatgtacttttttttttgctaaaaataatatttattatctatgcatgtctttcttttgccttgttatttacatgggctacgtggtatataaaggttgataactccttatactatgtttgagtttattaataattttgacatttttgaaaggaaaaaaaaaaattaaacacagtatccaaggatttataaaattcacacatttttgtttaatcaattaaattagattctcttagtaattaagaattaatttagtgaccggtttagtagtttaaaaaataaaacattttttagaattaaagagaattggttaaaattgggggtccaaaaaatggggaaaactaatttcanaactggtttaaaaaaacttacctttaaaaaaagaattatgttt

SEQ ID NO: 4979 - DNA, 690 bp, Glycine max
  misc_feature (645)..(645): n is a, c, g, or t
aaaccaaattataaagttaatttaatcatcacaaaactttgatctttcaacattattaccccttcgagtctgataattatgcattaatagattgcaacttggctaaaggaataaaaatgagtcattcaaattaaaattaaacctcaataaaagtattttagaaataataatattaaataaggtaaaaataatttaaaacaaaaaaaatcttatatttgagggaaaaaaatactccttccatttcttttttaattgtcagattttaaaaaaattaagtgtccaacttaatttggtttgttcccaactttttggatgtcaacacattaatgtcaaacttagtatgttcttgcgctaagtgtcattgcacgaatcaaactcttgagtctctcaagtgccctagttaagtgcaagggattggtacttagtgctccaaatgttggctttctagaatccgctttggcctatcacaacaaacatgtgcttagcgcacaaaaaggggatatctattcctatttttcattaagtgtgtattatatggcgcttaatgtagaacaacaaaaagatgctcttcaactctaatccttgcattaggcatgattaaagttgtgctacgcgctactaatgactttgggcctttaaaggggnttttaaaatcggtttctttatcttttttaaatcctacacaaaaca

SEQ ID NO: 4980 - DNA, 828 bp, Glycine max
aaagggtgattgatctaaattctgagttatagtgtgatcacttttatgttcactgttatagaatctgatgtagttggtgacttgttatatctgttaaaggttcttggtgttctgaaaaggataagtgatgaggactgtcagttgttgggcttgaatcctaagtatgcccgccctgactggatgattttacaagttcttccaattcctcctccacctgtgagaccttctgtaatgatggacacatcctccaggagtgaggcaagtgctttatggcactgttttatgtgtttttggttattacaagttttgcaagtctttttatttaattacaatttgctttcatcatattgactgatatctttgtgttatatgctgacttttttttgtctctgttgctttgtaggatgatttaactcatcaactggccatgatcatcaggcacaatgagaatctgaagagacaggagaggaatggatctcctgcgcatattatttccgagtttgctcagttattgcagttccacatagcaacatattttgataatgagttgcctggattgccaagggtattaattgcatttagactctagcatttaatactgatatatacgatgcttcctttaaccttcattgaatttttagtttttgatagtgcatagagtaattgctatttatttgtttattttacaggctactcaaagatccggaaggcctatcaaatcaatatgtagcaggctcaaggcaaaggaaggccggattagaggtaacttgatgggtaaaaagagttgatttttctgctcgaacagtcattacacctgatccaacgatc

SEQ ID NO: 4981 - DNA, 785 bp, Glycine max
agcatgagcacaccgtgttaaacatgaaataatataggctcaaataaaaattaggaagattgaaaatgaaacaaattgatgagaatgagaccataatatacagggctattatttatattctagcttctgaatatgcagcctctagcacaattgctagtgacgcaatgattaacatcacatgcaacttaacagcatcaacaagtatcaaataatgtacaaatgggattaataacaatctaaaacctagggctgtgtgctaaaatactaagttgtttgagaacgcaaagtactgaagaactaaagagttgtggtaaaataataaatagaagtgaagtcttaccagattctgccagtaatgacattcttccatccgtgcatttttcccttcttcaagcatccaaatcaaagaaattcattccataagtcgaaatcaattatacaagttgacttttgtggatgcaatgcaagaggtttggcttaaatgtacttttgccacattgcagttgtgtaattttgattctcgagtttcaattatccaagttgaaaaaacaattgggttcgaagagaattaatttaacaaaatatatatgtttttttagcacaagttaattctagaactgaccccggtttaatgtttcttaaagaaaaagaaagaattgaactgtttctagcagacgcttaaaagataaagggatgtatatatatatatatatatatatgataattaatatttaagagcacaaatgcattaaaaaagtagataataattagtaatgtgtctccat

SEQ ID NO: 4982 - DNA, 693 bp, Glycine max
atgagactgattacacaccagcatcagttttccatggtcttgtggagtctgcacagaagcaactacccaagctgattgttgggttattgttaattggagcagggtgtgtatgatctttctttatttgatccttttcttgctgttatttttatttcaacctttctacaaacaatcttaaagtatatacatcatatggctggcacaaatatttattatggtaaggagtaaaacatatggaatattagaatgataaattttagactttgtgtgacatgatagaaaatatcaagggtaaaatattcactggcttgtttaaaaactgtttgtgaaattaaattcctatcttagaagtttgtgcctttccacgtgatatgccaattgccaattagatgcacagatcaatatgaaggttttactctctttttttcaagaagtggtagaattttatttcaggcttgtgttctacaccaatagaacagagaggagtgcccagctgcttcagcagccagaagtcattgcaatcactgttgaagaagtttcttcaactgcaaagcctctggttagacagcttcaggagcttcccaggagaattaagaatatcattgcatcattacctgatcaagaagttttgttcccttgttcttatgctcaattattaagatatatctgactctgcatggtatttatcataag

SEQ ID NO: 4983 - DNA, 722 bp, Glycine max
aagatgttcataaagttcatggaaatctacccataaacttagactaatcatagaaattctccatcaaaatgcctattagtgtacttttaatgactataatgtcaactcaaatgtggagcaaacatgttaatttgtctgtgtagacaaaagaaaaaactaagagccacacctgtagccacaaatataataataatttgaacataagctctagaccaaaacatattatagctttcacactgttggcctttctcttggtactatattttgggaacaaatatagacagaataacatatcaaatacatgccagatggtcatatcattcacactgcaatgccatgtgtgccaacaaaaatctagaatcacattactggagagtccagcaaaaagacaaatcagaagcttttgaaaaatttattaaatttaataactagctctgaagtctgaacacattatatcacaaggaaacagttcaacttaatactttcatataagctgaacctcaagctgtgttactacatgagtttgaaataccagaaaaaatggttgtgttatcatgtacggagttcccaaacaacttcacattcaaagtttatgagcaacaaacatgatgatgatgttcaggaccatcatttgatgatgagcaacaaatattcaaagtctgaaatacagtgtaaggaaaattatggaaaataactttcatgatgaaaagaatatgtgagcc

SEQ ID NO: 4984 - DNA, 1449 bp, Glycine max
gacttgcatgcctgcagcttgtaacgagtggcgtagctcaaaacaaaaacaggtatagatctcttaatttcctttcctcaaacatctggagcaatctcattagtccgttctgttgttttctcttaacttggcttgcgttgcctaataattaagaatatgtggcagatgtcccgttttttttagtcactatagatccaaactcacgtgctactgttaggcttctgaaggactgggaagcatgtcagagcaatgctcacaaggtctcttactttactttaactctggttataataattaaaggtttaattgaatttctggtcgttctggtttagacttcgagtcttcgagtgattttagtcccccaagtttttttcgagctaatcaagccccttgaattttcaaattaagcaaatttagtctctccgttgattttcttctatttaataaccccaaattattatttttatcctaatagttagtgatttatgatggatttgagatatggaatgattttaaagtttagaagaaatttagtggaaacttgataaaatttaaggaattctataagatgtaagattagagtttagaagaggattttttttagattttttatgttttggatggaatttaatgttttggttgataagttttgagtagaagataatttaattgtttcaacttgtaaaaattttgagtataaaatgagaatttaaagattttaggaagaataaaatttatgaggggaccaaatttccttaattttaagcttgattagctcgaagaaaaattgagggaccaaaatcgcagacagtccagactagaaggatcacaagtgtaattaatccataattaaatgcagtccttatgaaattgctttttgaatgtgaaactatatatgtccttttatgaaatttaccagattctattggcagatcctttttggattttatgacccatgtcatctaccaaataatcctggatggcctcttcgcaacttcttagcacttatttctgcgaggtggaatctcaactctgttcaatttttctgctacagagagaaccgtggttttgcagatatgaggttgtcccttgttggtgaagcactgataacagttccacaaggtagagctgcattagttgtgtaaccactaactgcttgttgatatctcttttaatttgtttattgggtttctaacttggaaagagtaattatagggtggaaagacactgtgcctagtgcagttggatgggaacttaataaggggagaaaagctcctaggtgtataagccttgcacagtccatggatccaaccaggtttcttgcctgcttttttttccctcttatctctctttctccctcacccttttgatctttcactcctgtagtgctacttgtttgtcagctttgctatttttttattatctcttttttccaggttggccattact

SEQ ID NO: 4985 - DNA, 649 bp, Glycine max
aatataaataatggttcaagtatatctagtagttgataacaatttatactatcataataaggctagtagaaggccaaagcctttagatcactcaaaatcttggatacctgatttaagatcatatagggtaggatatatccattataagagagaatatgataacatttcactatttgcgggtaccaagaacatcaattatacaaatttgggatatataagtttttcaaaaatagaagaagaagggatgtgaatacccgctataacaagtcacaaatatttacaacaaggaagtgttgatgtatgttttaattcagttagttagttaggagttaggagttagttagtttgatagctatgaaggttgttatagctacatgtacagtgtgtataaaaatagtagtgatcatgaatgagaagtatgagagtgcagaagttttaattcagaattctaagtttcctctattttctcaatcaattctttcatcttctcttattctctaacatagagtgagtgagtgcgtagtgtgagtgtgtgtgagaactttatttgttccaacaagaaggggaataggggataagtctaggacatcaagctcccacaaatagactatacaaaacaaagcacaagcaaaacatataacaacacaga

SEQ ID NO: 4986 - DNA, 794 bp, Glycine max
aatatttacatcctccttcatgcttcccacctgataactggtgaataaattcttggatatggctgtcctcattagtcctgtgaggccttctgctactagattaaagagaaaaggggcaaggggatccccttgcctaaggcctctctcggggataaactccctagtgggactgccattgattaaaatggatactgatgcactagagagacagccttggatccactttctccacttgtcacagaaacccatcctcatcatcatgtaattaaggaaatcccaagacaccgaatcataagctttttcaaaatcgaccttaaagaacatgcagggtttattttttgttttagcttcagcaatgacctcattagctatcatcactccatgcagaatatgtcttcctttaatgaaggctgtttgtctttaatcaatgagatgaggtagaacgagggtcaacctattagccaaaagcttggatacaactttatagacacaacctatgagagagattggtctataatcattgagagattggggatcatttcgcttggggataagagctataaaggaggcattgcttccttttgggaaagaaccattgatataaaactcatctaggaaccgcataaaatcaggcttcaagatcttccaaaagtgcttgataaagtttgaagttaaggccatccgggccaggacttttgtctccaccacaatcccacacagctgctgtaatttctgcttttgtgaatctggccacaagggtttctctctctccttgagcaagagaagtagctgga

SEQ ID NO: 4987 - DNA, 833 bp, Glycine max
  misc_feature (682)..(682): n is a, c, g, or t
  misc_feature (684)..(684): n is a, c, g, or t
  misc_feature (705)..(705): n is a, c, g, or t
  misc_feature (708)..(708): n is a, c, g, or t
  misc_feature (748)..(748): n is a, c, g, or t
  misc_feature (756)..(756): n is a, c, g, or t
  misc_feature (772)..(772): n is a, c, g, or t
acccgcattggcgatgttggcctatcctcatgatgttcggcctcttcttttgagtccatattttgataagcacctagctcatcatcatgctctcaattttcacttcaataatcaaattacagcctccacaccatttctctaccaccacccttttggatcattgcactgaatttgatgattctaccacattttgattccaatgagaatgccccagatggacattatcaccaagtttattccagggatccttctttctctttctcacaaaaaaaagttttttttatatgatttaacgatcaaaacatcaactgattcctctgggcaggtagattccacttttaatttttttttccttttaaactttcaaacttttccacccgaacaataatgggcaccaacctgctggttctaaaacatagaacaataatattcttctcattaatgatggaactgccggtattattctcattaatggcaaaagaatgcgcagaatgaaagaggcaaatgaaaaagtataaccctccaacgcatattgcttgtaacggaaacaagagcgagtaaatgcatggaaaattcaaaaggcaagatcaatattgcaaggtggtttttggtgtgacaaacacgcatgtacctgtgttttctggttcctgaggaggctcggtccttgtcctagatagaacanancgagagagagggagaagaganaanagttgctaaatatatatagaaatggaagagaaaagaaggnaagatganagaaagaaccctttgnagtttgaacaaaaagccgagaatggaaaaaaaaaacctactcgtgtcatgttcaacaaacc

SEQ ID NO: 4988 - DNA, 762 bp, Glycine max
cgccaaagtgcccacctgcagtagcacaaaatttactttttgacccatatgctaaaaataattcattttaatctccaataaaacatttttaaattccttttggtccctaacattacacaaactttattttttcatcctatgtgtactaaattttatttaaaggattaacctctctcaacatatgatttatcatatgcttgaatcaataatcaaattatgatgatatatttaaatgataagattatctactatgaatcatatgacatcttatttggttgtttaaatattatgctcccaaaaaataggtgctaaacatatataataaatcatatattttctaatatcttattattatcttttcttaccttagaagatttaaatagtttatcacgccccaaaaaataaaaataaaataaaaatcctttattatcatgcacatgcagtggccataacacttggtccgatgaattaattaaagttggcttgcgtgctcggggatttctataagagccccgacaagtttggcaaaactgggaaacaaatggagcagtgtccgatcacaattaaattcaagttgaagaccatgctcgtaaatatattctcatatgttattatgtaatgttatgtggttttggtgacatgacacgagtagtttttttttttttccattctctgcttttggttcaaactccaaaggtttttttctttcatctttccttccctttctcttccattttctttatattatttaacaactttttt

SEQ ID NO: 4989 - DNA, 832 bp, Glycine max
cctaacttgctgcctgcagctgttatccagggccattggcatttattaacattttgttagatacatataattatgtattggtatatgatcaagtagtacaattagttctccattccatgaataccatagtcatctcttatgattatttcctatttctatggaatattttttaatctaggaactttatgttgataatctccctttccccccccaacaaatttgtagcttcaagttgatggcggtttcaatcagaatctgaattcaaagactctgtcagctcccaatctcagtgcaatggactaccctgcacttacttcaccagatggccagactgcttcagtaaaatatgtggttgataatgtccaacaaagtggcaatccttaccgatcatttgacagtgatgtgcctgcttttcaaatctggctcttcagttccatctgggggtggtgctattgaatttgcttcagctgttaggaagttggcttctcaggattctggtggtatttggaagtatgaaaaaaatggctctggtgatgctgctatcggctcaagtaggacttcaaatgttctggctagtgattacaatggtggacaggggagagcacactttgttgatcggttacagaacgttggttcagctcgggcagctcctgtttggcttgaaaccagtgatgcagttggtaaatacttatgtttatatgcttcaattgtgggatgtattctctgtccattattttctttaacaattttgcatggcagcaaatatgttttcagagctgcgggaagaggctccgcgatcatgcatgcccttacgtatgcatattttgagcca

SEQ ID NO: 4990 - DNA, 842 bp, Glycine max
  misc_feature (818)..(818): n is a, c, g, or t
tccgaatcggcctggtacccgggaatctctaaatcgacctgcagttgatagaaaggaacaaactccagtcatgtagtttgcagtttatttattatgttactcacttcaccacaatgtgcctcaaatgcatttttatttatggtgaatttcatagttattttgagcataaatttcccttacaaaaaggtttgaaaattatcaaactgtgtgcggactataagaaatgatcgtccaagttgtggtaatagtcaagtctcccttttttgtcgtttcattgtgtgtggatagactacaatagacctctgtgtcctataattcgactcagttgcttgttgactgagattattcaccataagacacgtctttgctcaacttcatggaaatttcaccaaaaagattcaaagattacgagaaatcagtcagaagactgtttcaactacggtgatacataaaagtggcactctattgattgaattttgtgtattgggttacgtattcctttttcttttttttcactctcttagccactactaaattactaaaaacataatatatagtttgaatttattctgcaacacaattcttgaaacttatacaagttttcaaaccagatcagtaatattcttggagctgttcctgtatccttgggttttaagtctcacatcttttggatttaaaataaatcaataaataaaacattttactcactcccccatgcagaaatcagaatcactcgataacaatttcgggctggctaaggctaaggttactaatattgttaacactatcattacagcacaagttcttgcaacacttgngagtcacacttgtcccagacaact

SEQ ID NO: 4991 - DNA, 734 bp, Glycine max
tcattatgattgaaaagtctaagaaaatatgttctttaataagcgttgctataaaaaatgatgaaatcgattctcagtttttctctaagatttcttttaatgaaaattttctatgggattttcactgattgtacacatgtattgtggtcatacttagtccatttctgaaaattacatattggtttgcagctgtatctccaatgtgctaagtactcaatgtgacactcttgattctacggaaggaattaggacagggagtcttcacagtttggataagaatgacaagactacagcttctgtttcaccttggccatcaaccacacacacgaggaggaacaagtctgtatgttttgcatgtgacagtgatttatcgtcctgtgactcatctgattatggtgggcgacatatgaaaaaaacagattcagcaaataatgagagtacatataaaccatcgcctaatcctaccccgatgaagctatctgacgagatgcaaactcctggaactgcttacccttcagcaaaagacttgccaaatggtaagcctcgagttaagtcccagtttgtgtatccaatttacaaccctggtcatcatttctctcagaagaaatttgaagagagtgaatcagttgagcagtctcaagttacaacttcaactcccgaaaaagggttaaagaaaatgtcttgtgaaaatgaatgcaaggtggaggaaagctagtcttaacttcctggttgaa

SEQ ID NO: 4992 - DNA, 821 bp, Glycine max
acaaaagtgagaggaggtgctttgatgtcattaaaggaaggccatcctgaagctgttgaagagacgccagctttggggctttcacatacccatttggcatcagaaaccagagattcatgagatgcctacatttaattttcattagtaacaacctacaagtaaacatgtgggagttgggattttgctagcacacccaatattagtattcctttgcaattccaattttcacaaagttgaagaaactcaagaaagtgcagcctaccacaggtagtgacgatagccatgaaatataaaaaaatttcattgttaaaattttaaaaagctaatctactaatgtgtttaatgtgcatggtcaagaaaatttcatactgtgtttatagtagtgaatgatgcaataaatctcatagattttgaaggaacagcaagttacattgctcatagcttggttgcagggtaccaatcctctactgtgaatcttgtaactatttctcaattattaagtaaatgcttttataatttcacccagaagaagaaagaccatagcttttccatagattatcatatataaaaaaattattctcaaaatacataaactaaagaagcaaattttccctaaataacattataacctagaacaatacacataggaggcatttaaaaatggaaaaaataaacaaaaaagtgtaaaggtgcatgtttctattcagcattcataatttgatatagaccgcaactgtctcaccttagctacttcttcccccttttctaaactcagttctgagaccttttcagctgaattttcacctttcttcacaaaactg

SEQ ID NO: 4993 - DNA, 891 bp, Glycine max
tataatttgattcatcatgatggccacaaaaactgctttcttcaagaggatgacaataaactcctttaagctgaagcattaaacagagtcaacgagtttcccttaggccttaacaataacatcccagtgacgcacacactctcactacgagtacaacgtcactgagggtattttcataattcactaaataacaaatacacttatcaaagagaaaaaaaattaaataataataataacacgaaggtttcgtttcgttcgttcaagccaacacgagaactcccagagaaaaacacgaagatatataatagcgaagagaagaagcgccagatataaagttcttctctctttatatcaatttgtcaaagagagtctctgaaaaatccccgatttttctttctttcgaagccatagttctctctgcgcttctcgatcttcgttcgccctcgaccttcttcggattcgctcaatcgtctacggttcttctcttcgatctgcgccttcaatttcctcattccttttcgcggtaatttttctcgtctttgttcttccgcgttgtgttttttcattcttctttatggattatttaaccgactctcggagcttcgttgcgtgcgtttttttgccgttgcgaatgcgtcggaggttacttgtgtttcgataaaaccctacatttgcttcggttatgacatatttgttttttttctttgtggatttttggaatttagggttttgaattggagctgcggaattgcggagagtgacgcgtgtacagcatgagcattgacagccccggcggagggaaggattagggtttcgtggtttgtgtctggcggtgaggatttttccatgggagatggaggcgtggcatgtatgcctctgcaggcatgcgag

SEQ ID NO: 4994 - DNA, 823 bp, Glycine max
tgcctgcatgcctgcagtgttgacactcatcttactgtttcatttgcattactttttcctcccgtcttcaataggaagttgattcagttttattcatttgcatgccttttgtagatcaatgataatgattttcttcataaatatgaatatgaatatccacaataggattaagtttattcgtgatttctaattcaaacaattacgttcaaatgtacttaattgatattatgatattattccattatcatggcatccctaactttgaattatgcgaaaaatagagggaacagacaagtaggtaatactattatgtcgactgtaaaatagataaataacgaggtccttttgacatctgtaaaattgcatggggctgattattctgcaacaagagacgtcgtcatgactagtctaggatgtgtcctgggttgctgatcttaataaattacttcattatttctacacgcaactgatttctgctattcgcagccaatcaaataatgtcccttttacagaatcctaacctgaagcctcaggagagccatgtaacaggtaagacatgtgacctaactagatatagaagtcccttatggtctgatgatttgattatatgggatttccataggaggccgatcgtccaatgggtctcgtcaaaatattggggatagggaatcagccgcaacttcgaaatgccttgatattacgtcttctgaaggtgagtcaagagtagatggaattatcggacatttcttagtagctgttctttgttttgactgttgatattgagatgttagtaactcttggttgactctgcttgaaatgggtt

SEQ ID NO: 4995 - DNA, 781 bp, Glycine max
aaacatgagtgagtggtaggactataaatttggaagaaaagcaaagcaaaaaacttcatgaggtcctgggcatccttgctatctgttgcatctcactcttgcaaatggagaccaacatacaagcaatcaggatatttcccatcatgcaatcaaacattcaattatgataccaactgacaaaagccaaatagtaaaattaacactaaattataagtttttcatataaaatattgaacttacagtaacattggcacctaaatcacgagtattgatgaatgaccggccgttgagcctgtcatggctgctacctatgtatggtatcaagagcttcacatcactcatggccctaggagtcactttctttccaaaagacaagttgtttatgacatgtgacatgttcatttgagaagcatcaaaagaatgggcgtctgatctagctgagatgatcaaatttcctggaacctgtaaagtgcaaaacagtttatatttctttacaaaattgaaatctaggggaaaaaacaataagttattttagtattaataacttaagcttctactataaacaaaagaagatgaaaaaaagaaaaaaaggattccattgaatcagatatttccaaaacaacgcaagaccatcattcatggttacatatgaaagctaagaaaaaaaggagtttttctataaattatggttgaaggttaaaccttaatcttttggcatttacctttttcacacgcacatatccctctactctacatccacctgctgatggtgctggccttt

SEQ ID NO: 4996 - DNA, 831 bp, Glycine max
accaatgaaaacagcttgaaaaacccgaccagcgatgtctgcaatatactcaacaagaaatgccaatgatcctgccagcagagtccccaaccctctattcagtcctttgcctaatgttgctcctgcaatatacataagcaaaaaggatgatgtatatatacatatacgtttaggtttagtgtttgattatgcctggactgagaaatgagtatagctattagctagctagccttaccaacagtaaactccatcaccacaaccacagtgagaacagctgacatggcattttgtccaatccctctgaacaaaggctttattagatacagcaaagaaactagtgtcaaagccaggcccactttcaaagaatggaccacccttcttggatcctctttccctactttcactgctgttctccatgccaaacctgaatatcttttcactttctcgccaacactattcatattcttccaaatccaatgccttctgttgttacttgcaaaataattgctttcagccatttgaaattaactttcaagcctgaatcagctgtgagtaagataatctaacccttagcagtttcagttatgatctagaggatgcttgtaacgtttagcttaaaaagcatgcacaaggtgacaaggaacaaagagtattaaatactgtggggaaacttcttgttaattccttcgatcgatgataaggattgttagatatatctggatacagacaattccagctcccctagtgtttacaaagagaaagggaataagttggtagctttcataggtacttaattattagaatacgtggagaaaaccagcttcacagtaa

SEQ ID NO: 4997 - DNA, 719 bp, Glycine max
agttagatggaaatatcctctgcataaggatataagctgcatcttctagagaaccttctttctgcaattttaggagggctttcctcacatcgtcaccataaatattgtttcctgaaaagtaattatagttcgttagataagtttcttcccctctctcttttgtttgttaaaaaaggtaaggcagtgaatcaaagtttgggtgtataagacctcctccttctctttggggcttcatcacaaataactcgggcctttcaattgcttttctaacaatatttgagtcatccaaactccacaacccagtaaagcatttacgcagtttggcaatttcttctttgttttcaatgaacctgcttacagttttgacacaaggatttagtttgaacttagaactgcttgttttcgaagccaagttgcaacaatcagatagtgtttagggcataaaataaactttttgggtagcagtgtaggtctgtggaaatccatcatttatttccttctttttgggacaaaagaagaactgaagaaatatcattacaagaaaaaacagaagtccaagaatagtggataagaaatcctccataaaaacaatgaaacatgaaagcaaaaataagaataagcaaggaaagcccatcaattcaaacctccccatgctaatttcctcatttcctctgttaccatcaatctctcagatcaacatctaatccttcctgcaggca

SEQ ID NO: 4998 - DNA, 844 bp, Glycine max
agaaattgtttgagttggaaccagaaaatacgggtagatatgttatgctggcaaacatctatgctgcatctggcaaatggggtggtgccaaaagaattaggaatgtaatgaaggagaggtgtttggagaaagaaccagcttgtagtcggatagagttaaggaatgcgagacacgagtttgtggccaaggacaagttccatccacaggttgaagagatatgtgaagtgaacagtaaattagttcttcatttgaaggatgctggatatcagccttatactgattacccttttcttcctgattatgatgatgatttctactttagttaggtcagtatactcgcattgatgagacatggtgattaccaaggatactactcttcaatcatactccactcagtaagctttgtgagaccatctaataagggtgtggtagtttccatgtagagaacattcaaatgtcccttcaactcaatgatacaagactcatgtattggagtgaacatgcattggaatgtgtattaactgcaacacaaacacacactaatgcgtgtttgggagccaaatacaatggatgcaactggtattttttccaatccaatgagagttacttctatgtttgattcctcagacgccaagcggacgtttagaagctttcaagcattaatccaaacatatcctaagtaataactgaatgtgattatatttggattggttagtttagtggccttcactgtacttggctactgctgttgccgttgtctcctcatgtcttgagactcaatactggcattacatttgtattgaaatttcaccctatggctacatccaagtacaatcatttgatt

SEQ ID NO: 4999 - DNA, 742 bp, Glycine max
aagacaagagcaatcacaaagtccatacaaatttcgtacttatactaacggtaaatcaaagatgaaatgtgagggggaaaatggtgattaaacttacttaaaaggatagccgcagatattctttttgataaagaacttctaaaaatgaataatttctttcagaagaacgagttatagaattgtacatttttatcatgtccaagtttcaacaaattttaaaatggaatattaacataatttccaactgtaacatcacacagtaattaatgacctaaggtttcgttataacaaactaaatatatgtttaacatattctttactgctgattaaaatttataaaaaaaaaaaaatgttggcacaaaattgtgatttgtaataaattaaaattaataataaagtatttttaaaaggtgtgttatatgatggggtagggcatctcttatccaaggcaaagaaagaaggataatccaacagaggcagaaccaataaggataatccaactcagcttcttcactcccctcaccttatcaagaatccccttatagttaaccaccaccaatcttcaatctcctcctcactgaatctaaaaaccttcccttctcttctcacccccacactcccatctcacacacccctcgcatccaacaatgtctctcaccattccctccaacctctccaagcccgccgccctccgccccaaactaagcccaaagctaaggtccgccgccacaaccaccatcgt

SEQ ID NO: 5000 - DNA, 814 bp, Glycine max
gcattcctttttggccttcaatgatgatgcctccaaattttttttataggaaagaaagattaataagagacaaggtcagctaagattggctaagtcatgcaaaaaaaaaaaaaaaaaaaatctaaaacaaaagcaggagtaactataaactccttagagctagtcatgcaaacgacctccttccttagccaagccatgtgccacttcattcgcactcctctgctcatgctggaaagtaacttcccaagaaaactgtagaagagtctcgatgccataaataatatctctgtggagatgcatatccatcaccttggctatcaatcttcgtgagaagctcaaacacctcaaggcaatcaactacaagtatggtgaaccctaaataaaaaaataattcaaaccgatctttagtttaatttttttaattatttaattagttaacttgatgataaactcgaaagtcgtactaaaaaaattttaaatataggaatcagcgggcaaaagtcaaatgaatttgtaaactctaaaagttaaaaaaattaacaatttgataaccaattctacggatcaagggacagacatattgaacgctccattgctcagttgtcaagacatatttctccacttccacaaacatccgatcatggaaagaataagcgctgaaggctgataattataatcacgaccagaatccaagattgactattctgacaagtcaagatagaattcgaattaaaccccatacgaagccaaacttctttgaagtgcggaaaatctgtcaaggacatctaggacacgctgcaggcatgacgggttg

SEQ ID NO: 5001 - DNA, 684 bp, Glycine max
gaaaaaggtgcagaaaacacatgatggagactgatgaatttgtgtcaagcacctctgaaggttacctaatggataccattaccatctcaacagcatacctgaagatgaagaatctttgtgtttcaataagaaatgaaattcaggcagacataaagatccacaaccagcatacgatccatggtcagcatatatttccaaggtaattggctatataataagtctataacagctctctttagcaagttgacaatacagttaacagtgcatacaaattgcaattcatttctcacacgtaaattataatgagaggattacatttatctattttacttcccctgcatgggagatgcaattggtctttattaaatctaaacattctgcaactttcaattagcttaacagaatgttattttcttctgtttcagtcagagtttttcattatcaaaatctgtacccatacatccaatgatagcaatcaaattcccttgttattttttctccatacattttaattttggttcatcatagattttctgagttctattttccaattttcagttcaattgacctgacaaacatcacagcagcagtttacagcacagagttgggtaagagactgagagctttcctttctgcattgccaccatcgagtccacaggcacatgtaaatgagcttctagttgc

SEQ ID NO: 5002 - DNA, 778 bp, Glycine max
tgcctgcagcatgtcttcttctgattggctggcactcttgcgagatgttatgatgcttgcgaagatttcagcaagctttttgcgtgcctggtcacggcgcttgtgagctgggattggcaggtatgggaagagaacactgattggaagcatcccattgtcaaggtcgtggaacaatgcagagacatcatcaaagagcttgtcacgaacttcacgccccaagagacatctactggctgtcaagatgattagatgctcaagctcatacttcaaatcaacctcaccacttggtccccattttgagaaatagtcctgcaaattgagtttgtgtttgggaaagagcagtcttcaataccaatacaacaaatgaaaattacaaagaaagagtttactattaacaacatagagaaacaaaacaatgaactgccaggtttgatgccatttcaccatggtcaagtccaaatggaaatgaggagcttctccagctttatatggaatgaattcaagtagcagaataaaactttgttttcaattaaaagaagaatcacactacactaagaggagagttaaacttataatcattgttgacaattcaatgacccattctggtgataagaagtatgcatttttgctataaatgataaaattgttaaattttacccagttttctagtaagaattataatgccacacttttcactctaaagcaaaatcatctatatctgattccaccaagttggataaggctgcttagttattgttattattgaataaaagttgca

SEQ ID NO: 5003 - DNA, 803 bp, Glycine max
tttatttgcatctctgagaacatgattccatgtgacataacctatacgactatgcacatctagaatttctgctaccaggttgtggactgatgatcaccaacacaaccgccctcaagaagatctatggcctccttagaatcggaatcaactcgaagagctttccattgatgacccttttgaccaatcgggaatcagataaattcatctctagacaccttctccaatctttgcatgtatagaaaacattcctatgttggcttctaatataacaattccacacctgcttacaatcattacagtcccggaaaagatgcaagagagcctcagcttcagcttgacatgcagaacacgcatcattcacactcatgccaattctcattctcttggcatttgtcaaaatactttcatgactaatcttccataagaacattctaattctttccggacctggccatgtatgcaccagcttaaataagttaatatcagaagtcacttgcagatcacaaacaacaccataagctgacttcaaagtaaaggaaccatcagcagttcctttccaagctattgtatccaaaccagcttctgttcttggagggttcatacctaatatgttgcgaacaaaggacacaggtaaatagttatgaaaattattgtatcataataacactcaaccgaggcattcaacacatcttccgggacatccctggattcaatattcaataaggaatcacaattccttgtgcagtacgttgtctctctagaatttcactttggatccagcacccaacacacaaaccgtattt

SEQ ID NO: 5004 - DNA, 903 bp, Glycine max
cgcctgcccgacggaaatacggttagtgtgttgggtgctggatccaaagtgaaattctagagagacaacgtactgcacaaggaattgtgattccttattgaatattgaatccagggatgtcccggaagatgtgttgaatgcctcggttgagttttattatgatacaataattttcataattatttacctgtgtcctttgttcgcaacatattaggtatgaaccctccaagaacagaagctggtttggatacaatagcttggaaaggaactgctgatggttcctttactttgaagtcagcttatggtgttgtttgtgatctgcaagtgacttctgatattaacttatttaagctggtgcatacatggccaggtccggaaagaattagaatgttcttatggaagattagtcatgaaagtattttgacaaatgccaagagaatgagaattggcatgagtgtgaatgatgcgtgttctgcatgtcaagctgaagctgaagctctcttgcatcttttccggcactgtaatgattgtagcaggtgtgggaatgttattttttaagccaacttaggaatgttttctatacatgcaaagaatggagaacggtctagaaagaattaatctgattcccatggtcaaaagggcataaagggaagcttttcagttgattccgatttaagaggcatatatttatttaggcggtgggttggatcataatcacacccggagcaaatttaatggctagtcatagtatgccatgataatgttcgaagcaaaaagtgcgtcacttgggtacccggccgactaatcaaatgtaacgttctgggaagatcctcaaccaaaacaccgacaaggaccgggcaggacataaatgtgcttgccttccgacctccttataacacggag

SEQ ID NO: 5005 - DNA, 855 bp, Glycine max
aaccacgcaggttaactagattaatgtgcttgatgctacccaatatttctagttccctttcaaacccctgatcagaaccttcacggcttctatcaatcctctttacagcaaatgtaccacaatcattcatcaccattcggtaaacggtaccaaatcctccagaccctaccacatcatcttcatcaacagactccaacttttctatgatctccaacgatgtgtatggcatatcaccatggaaggtgatgagttttgtacctgttacaagaccattttagtatttacaaagaagaaaaggacaaaaatttgttatgttcttttctgtgctgaataggagtgttaaatttgaaataccatcatccttcctacttgattctggattgacttgatccttcacttctatatatctcctggcagctctttccttctttgatagcaaacaaatccatagtaatgaaagtgttataacaagtgcaaggcccattagtgttattgcaccaactagcacccacttcacataatgtgaagatcttttgtcagggactgcatcatacaaattcaaacagtgattactctatgtaaatttgattataagatctaccaagccaaagtgtacttaaaagtagaatatttccaactcttaatacaacaatacaacatcttcctgcttactaaatgaagaaaatattgaattgaatgtttttatattttcaaagatattaaatgcatttgctttttatatttaacatggctgattaaaaattgggagaatcaatattaatatgaagatattgtaggaggatatagcattattgctgaaaatacaaagcactggattcgacttgctgcaggcat

SEQ ID NO: 5006 - DNA, 748 bp, Glycine max
aaacttcttgccttatagatcgttgcaactcaagctgcatatccatacaagcctccagcattctctgcatgttattcatcctttgctgtaatcgagccatgtcaattctcaagtcgttaataatctccaaatcctgccaaaaagacaaatcagagaattatttaaatgacaacacatttataaaaaaatagttatacccagcaaatttaaacttttttgttcctataaatcattgcatgataaatcatcaagcaaaacaaattttataacttacattatctaataaaatacatttacaggaccaatatgcataaaaatcattttcactttattagagcatatattgaacatagcacaacgcaattttacgcacaattactagatgctgattatttatgtcattctgtgaccagttgtcacgatggtggtgctggtcccaaataggcagaggaggcggtataggtaaagagggcaggttaagtggactattaacagtaccctcctcctgaccaacaatttgatccctactctgctgctcaaggtcctgctctactgaggcagaagaaggggttgtttcttgcaactcccagtcaatgttagcatgaccttgcctttcaacatatgactgtatcaactgatcaagactctcacggaaactgctgccaaggaggttagagacacttctcctgcaagatgaatagagacttattctagattacaattttcatgttaggaagattgctaatgc

SEQ ID NO: 5007 - DNA, 801 bp, Glycine max
gcctgcaccgagtagcgatcatccatgaataacccaaagaggcacaaatacatacgtaagcatgcatatcagaataaaatcgttgacaatgtcatatattcgtaagtcgtaattaatcatgcatgcgtagaatgctacaggtgatgaacgtggttttggtttttgcattttgtttttgtgctagggcgcagatctaatacttgaatgggttgaatcatatacaggggtaattaatttgttttatttcatctcacatcttttttcatcatataataataattcttattttctgtcgatatctccctctctctctctctctttgtctgcatttccatatatacagttgaatcgtgaatagatgtatctaaacattctcgtagatgtgaaataattattttccttttcaaatagggttttctcatgtataccagttatcaaactaatctttgcccaacatatataataattaacatgagttatattacgtttgtacgcacttttaattataacaatttttatatctcattttttttttatcatcatgttacttaataatcttatctcaggtacatttacagacttttaccccttacaacaaaatctagttgggactaaataatttcccagtgatatggggggtggaactatatagtattattagtatatatagcttgaaaatactacagtgattccatttaagtattgaactgatctaaaaggaggaggaaaaaatggaaactcaactactggtcttatagctaactagtcccactattacaaataaaacttcttaagttggtt

SEQ ID NO: 5008 - DNA, 810 bp, Glycine max
agcaggctgatagtgtagaaggaactgtcattgatcgtgatggtgatgaagttacagatggtggacaatattcagctggtccttcaaaacgtgcacatgactctgatatttttgacacatattgttcacctcaacaaagagactcatctggtgccggtccgagtcagtcaatgggtttagaggcttacattactggaaattgagtttcttcataccgtcaaggtagtgacctcccaatgggtatccaatcagctagagactcaacccgtgcatcatctgtcattgcaatggacacaatatgtcatagtgtgaatggtgattctatggaaagtgttgaaaactgccctggagaccttgatgatgttcatttcccctcctctagcatgtatggcaatgtggacgtgaatgaaaaatctgaactgaataacagcaatcaagctcagcaaagcacttgcttacaaacagctactgaagttgcccgtggtgatgtgggcgtcagtggtacaaactatggggaagaacttttcaatgcagaaactgtgactgctcaggctcgtgatggaattagtctgggcatcagtggagggagtgtttgaatgtgtgctagtcatgaagctgaaatccacggggctgatatatctgtgcacagagctgatagtgttgttggtgaaatggaacagagagtagaagatgctgaaaaccagggacagacaggtgaatctgtttcagatccaggtctaatggatgagtttatccctgatatgaacagggaagatcctattggtgatagccaggagatgatgtctcact

SEQ ID NO: 5009 - DNA, 811 bp, Glycine max
aattttgtaattctggatcatatcatactcagtctttgcatcaaagttcacctacaataaaacccacattaagaaaattaccctaaatgtcataatagctctgaaggaaagttaaaacaaagtaaggtttccaccttgtgcattggaacaacccctggaaacgtcatatccatcatctggcattgcacagccccagatgcagcctagccaaaaagcataaacaaaacaggatcagaaccaaaaactacattttcatcctagataatattcctagagatactttagtagcataaacgatatggatgtcacacacacttgcacagtgttttttaactatctacattcttcttgcaagttataattgtcctcaaatacttgtgaaatcaatacccaagtacattataaggtgttgtgagtttagcaagacacatgaaaaaggggtgcagagagagatacctcctcaatgcgtgagagattgaggtggagcctgttgttgatccaggtcagaatctggttcctgccgacaaagtaggcactgtccatcatgcctatactcgacgccatttttgctaataacctagagagagagagagagaaatgggaatgtaagaagaagaaaatgtgggtgtttttgaaggaagggaagaagaagattctgggtggacaaaaatcttaagtgggtctcaacgaagcttcgatttttatttcgggagagagaaagagaaatggaatgtgtgacagtgagcattgcattaattgtgggatttggaatttgtactcactcaaacttttcacttcttcatcacgctat

SEQ ID NO: 5010 - DNA, 851 bp, Glycine max
aacaacataagcactgccccactagatgaagtcagctatatggtgcacacaaagtcattgtgcattgtaaaaaaaaaaaaaaaacagaaccaaaacttcaaaaaggccatttgttagggaccaaacacacagtaatggaaaataacacagtaaatgagagaaggtgagtgttattgatagccaaatcgaaaatatagttgggagtaatccaactgccacagagccaagctcctctagagaggtcacaattctctctccataacagaattccaaaattcccccataccctctctctctcacacacaccttccctatataccctcagattctctctcacacttttggcaattctgttactccccttgccacctcatctttccctttctcacctttgtttcttctagtatacaccctccatattttgggtctctctgttatttctaagctcacacccccattccgatcaccatttaaatcaaggaattacaagcaaaaaagaataaacaaatgaaaataaaataagtgctataacttaaaaacccccatagtcccaaatgacaggacagcatagagaaaaaagcaaaatacataaagctactactaactcaccagaagaggcggttctcacaatttctgccattacgagccttccatcctcactggacaaccgtttaaaccattcagggtttccatcacaacatgtataaatcaccatacacaacgggtcacaagtctccttggtgccaagtctagcaagtgatacaaacccatccagacagagctcttcccaaacagcacattgatgctgtttccccgccaaagaaacatttgccagaacctgcaggcatgca

SEQ ID NO: 5011 - DNA, 804 bp, Glycine max
ggtaaatcccagctctaataatttctgcatgtgatatgattacaagaaaacaaaacataataacagttctaccccatacacaatacatgtaaatcaaggcacacgcatgagaaagtcctttaaaatatttttcatttcaagacaatatatttttttgatctgtagtgtaattgagcacaaaggcatatcaccatacaataaattagtcttttaaccattgaacacgagggtattagatgtatgattttgatggaaactttatgattctttaggcagttaaggtaagtgttattcatcaattaacgaatggaaaggaattacttgctgaatctgatgaaaactctgaggcattagctcttatcattgatgggaagtctctcacttatgcactagaagatgatgtaaaggacttatttcttacacttgctgctggctgtgcatctgtcatatgctgtcgttcatctcccaagcagaaagcacttgtaagttttccatgtactttataggtttttttatccgtaggaattgaacatagtataaggggatttacaacactcacgcaccctactcaacccactgagttaaacccccttggttatagtctttggtttcccttcgtttattgaagcatatttgtatatgtgaaataaaataacagatttatttaacttgaaatttattattagccaatgtggcaaagagacatttactgcaaagtaatatgctaataagggtcagcgcttgtcacctcctatagatggtgatattcatgtgttcaatctgttaaggtatttctattataat

SEQ ID NO: 5012 - DNA, 677 bp, Glycine max
ttagagcgattcagcttaataaccactagctatgccattaagaaatcagaagattcatcccaaaaaatggcttttttatattgcaagttccagatctttctatttattgggcactatagaggctgctgaagtcccgtaggtacaaggtttctagtttcaaaggaaaagagatttttctttccattcatgaagcagcaatgaattcttgaaaataagcataactaactactgctagttctgttaattgtaattacttgttattctttcattttattctttcatatctatagtttctttaaatagtataggctgtcactgatttcaatcccaaaacttaaagggatttgattatgttctttatatatatttgaacaatttgctcatgtaaattacattgatcaagattaatgatgaataaatgggaaaatgaaaaagaagaaaggtgtttcagtttcagtaccaacaatttaggctgacccagaagatggcccaacaatcaagccactcaaccaaacccagaaacttgatgattataaatttcttctttgctattatgcatagaacattgtatattataatggaaaccaaggaacagaaacatgtcacttgtattactgaaaagagagaaataagagagaattactataagactataacctcgcctaacagacaaaacg

SEQ ID NO: 5013 - DNA, 843 bp, Glycine max
atgtgtacttttttgcatcttcaaactatgaacttacccagtgttgtctgatctttgttgtgtggttctgacccatttttagaatacttcataaatattatatggatgtaaaaaaaatcacttttgcaagagtggtttgttattctggtgttaggttcttctgtcagctaaccgtgagcactgggtctagttttgtcacctgcatctttgtattttaaaaaatctacaccgctatgttttgaagctggatatttgcagcacactgggtgtgacgaagataatcttattcatgttaaaatctgtagattttatatatatatatatattctctaaaactatatgtctcaattgagctttaaccaagttgtacgtatatcttttcagaaaataaatgcaatcaatgctcagtatgaagaaaaactagcagcactccgagctcagcatagcagccgcagagctgaatttcttcaaagggaatcacatgctaggcaacagcagtaccagcaaatcataagggatccttaccccggtggtggcatggcaccccgagaccctcatgcaccccgagaccctcatgcaccccgagatcctcatggttacaacaatgtgaatgattcaggtgcaggtggagaagtgcaacgaggctattctgccgatcactttgatccttaccgagagagagctcgatttcttgggggtggtagagatcaaggatttgaacctagaggcccatatcctggtggccgtgtctatgacactggttcacgctactacaattgagttatgacccaaaggtttatctccattttgggtttatactgcaggtcgactttaaaggaatcc

SEQ ID NO: 5014 - DNA, 772 bp, Glycine max
aacatgtttactatttgaacaagaatcaaaagtaaaggaaacagaagcttctgttccagcaaattgggaaacatctgagtcttctgaaaatgttgaagtgagatatctccagataattgaagagaaggacaagattttagaggagttccaaaaaggggttataaggcttgaacaagagtcattaagaagagaatttgaaagtagtatgattgcaaaaagcaacatggaaagaaccaatgagtttgagaaagagaatcctattcagattataaagggaaagaatgtgagaacagatgaaatcatgcaacagatgacttcactggaatagaagttcactagctccttaacctccatttcctcacagcttgcatagaaacaggctgaaattaaattattcatgtcaaagaagcttgtgataagatcacagcagctgaggttctagctacacttgaaattgaagagaagaagttgatgatggtggaacttgagtatgatatccatgatatggagcagaaactgaaattgcaagaggaaaattggaggcaatcagaacagcttgcattggatattgaagaggaaatggaagcaaaacaattacaaataaagaagttgattgatcaaatggagaacaagctaagaggctcagatgtttttcttcaaaaactcaagatagagaatagaagtttgcttgaaagtgctactagattgtcattagaaagggaaaacttgttgggttttgttttaggattgggtgataaaatgtgagtgcgct

SEQ ID NO: 5015 - DNA, 710 bp, Glycine max
tcatgcaattttctattgctcacactacacccaactaatccgacaattttgttaaccccgttgaaaggaaaaatgaaagtaaaataagctagaattttgtttcactacaaagtactatttgaagctctacataacataaccagcttttggagattggcattgcaatgtaggacatgaccagcacagacttggtactcacaaacttatacaaactatacagatggctttgtcaaagaatgcaataatatagtctgcgttgttatcagtacatgtttgagaatatgttgtgcaaatattattacaaatttgtacgcaactttttgttgtataattacaagtgtggctgtcaaattccttgcaaacaatcgtgtcggtgtctcaacttctacctttctttgaaatattttattgtacctgaaaattttaatacatccgcataagtgagattatgctagaagcatctcacagctcaatctaatgttgccagcaaagtatctcacatgcccataagtagtctgactagtcaaaatgaagctctaataattttttttcctaaacatatgtccagctacatcattttctttatatccttatgattttcttcctcaatagaaaatttatagtttgcatttgcaaactgtataaaacaccataatgtctggaactcgtgctgaatcttcagtaactgccagattcataaggtgcaggca

SEQ ID NO: 5016 - DNA, 779 bp, Glycine max
cctgcagtcgaagaatgcaatataactcagaacaaaaatcaaaaagagaaaaaaatagtaacaggtgtattcaaattacgaataaaaaaaatcaattaatactattattgataagccaaagaaaatagatagtgaccgaaggtacaaaagaaactaaaatatgctaaaccttagatcaaattatgaagcaagcaacatcttcaaatatgaggagagaaggaaagaagtttctagatattatttgacaattcccaaaagatacaaatcctaacatgaatgtacaggttaatcctaataaatgaaaattagaaactttgggcaatataatacattctaataattataaaaactacaaggatgtgtataggaaagagaacagatattccatcctgaattagttatttacgtatttacaacactaccccttaagctggtgaatggatgtcaatcgttctcatattgcaagctgctaaaatgacttagtagccaggccctatgttaaaactaggagaaattgtcacacaatggtttgcgaaagggagagtggtgcaaatatactaagcccattaaaaataatttcttccaataaggcggtacgtttggtgaagaataggaagatcattagggttcaaaggtgctagtgaagcgggatggtattggcctaccatatgaaggcatgaaggtgtcaatggtggctgatactatgggcagaagaaaaaatggccataatgaaggcagcaaatagagggcacaatgaagttgttaaatgctgcaggaca

SEQ ID NO: 5017 - DNA, 804 bp, Glycine max
atgatgggtatgagtattggtacttataattggtgtggttaagacaagtatatagtaggagtgtatgaggtgcgtcaattagaacatgtttagctgtacattcctctcaactatatattctgttcattttcattagataatgtcacaatgaatttttctatgttcattggattcatcctcttgcaatgcaggatgtcataggaatggacttttcatttgttagtgacttggagctgggtaatgtatgtagaactaacttggagatgtctgctgtgtgtacacacttaatggatacagttgcaaattgcaatttagggtggggtagaatgttgatatcatagttcgtaaaatagggatgttatgtactccaaaacgagggaaagaaaaagagataagcaaagttagatgcacagccaagggtacgttactctaccaaaatgtgttggttttctgattcagtgaattattctagcatggttttgtttgtggtgtttaaaccctccagatttgagttttggacacaacgctgaatatcatcgtgtagccatcaatagttattttgcttgcgtcttcaataacacacgatggtggtcagaattgcatgtatttgaagcttgtgttttgctggttctttattttgcgtaattatgttcctcgaatgcttaatattaatacgcaaattctttaccaagtcaccaaccatactattcaagagtttgtacttaaatgtaataataccccacaaaaaaaatcttttattgaaatcaaacaagttttgtttttttcgggtgcaaaaacatgtct

SEQ ID NO: 5018 - DNA, 731 bp, Glycine max
ttttcaagttgaagcatgagacaaagcatgaacacatctttgtggttggaaatactggcaggaagtttgagattattcttgttaagtatcttttattacatagttctttgtctaggtttagatgctcttcttgagtactcatttaagtttattataatttgccaagtgtccattaatttgtcttagtgctgttcttgctttgctcatattttgtaattttgggtctcaggattttcttggtttggtggagaaattttattacctctctggcagatatgacattgagctgactgttggggatactgtcatggtatcttgcactattttatttagtcaattttccctttaccccataatacaataggcaatctaagcaaaatttatttatggtttcaggagaactctttcttacggctgcttggtcaagttgatttagatcttcccgaagcacctgagaaggcagcccgtcttcctccactccctgttgatccttactcaagatatgggcccaaagccgagatagcccacttattcagggctccagaaaagcgaccaccccaggaactctctcttactttcttgggtttgacccttctgccatttattggctttttggttggggtaagtcttgtgtgaataatcctcccctgaaagtagcacacgattgctgatgcctttaagaaaaaaggcagtgtagataatgtgaaaaataagataagtggaaagagaat

SEQ ID NO: 5019 - DNA, 788 bp, Glycine max
aaaaagaaaaggaaacaggagaatagtatagatggttaggggagttaaaactaactattttaaactataaaattaatatgaaaagaatgaaagatcaaccaaattgataactgaaaaaggtaaaaataaaaagtgttttttttttattgtgacttggttcttttacagtttctgatactaatatcttgaacagggttacttttgaagatagttacgagaaaaataaaatgtatgaatctggacaaaacacaaacaaaaaccttagcatgtttgattagagattaatttagggaaaccaaacacttcaatataaacttccacaagaaattaaaaaaaaaatagttattttttaaaataaattgatccaaaaatgcaagagaaattttcgcacaagaaaaaggggaccaatttccctccccttttatctctgttgttctgtttgcttgttaggagtccaagtttgttcagttattttctatttgtctcttatgctttttgttctttgtatatgacttacaactgtggaggtgagaaagagtaggactatgtaggtggttttacaccatttgagaattgaatgttttgttggcttgttgattcacgtctagcaggaacaacaaaatggaacttctgcattttttttttcatattttgatgcgaaaaagtataaggcacatccaaaatgtgtaagcaaacaagcaccaaatgtgagtactaaaactagaagaatcaaaatgcacatagaaacaaacttgccataaattgaaacaaacttgccataagaatac

SEQ ID NO: 5020 - DNA, 738 bp, Glycine max
aacgacacagagtcctctctctctcataagctattttctcgcgttttctcgacgattttccttccatccaaacactcccaatcccttcgcagccgcttgcggtttatcttcggatcctcacaagagaatcccttgagcttccaagcgatctctccctcgtccttcctccctggtacgtgatctgttgtcactccgctgaactttctcactctcgatctcagatcatgttctctgaattcgttatgttgtagttttttcgaaaaataaatttacctttcagtatttgtctagtcgaggatgaaaaagaaggttgaacatacgaggtagcttatgcttatgatagatcgtgtttactgcgatggattattgtgttcggtttagtgaatcgtcattaaattgatgaggttattgttattacgtgattatcaatggagaatgcgagaacatacacagtagggtagtttctacatggatctattgtgctcttgttgagtttcgatatgtttttattttttctcaccgatttaatgtgtcgagagattcagtgttctattttatatagcttgtgataatttattttattagtttggcattggtctagcaaaatgctatgcctttacagtttttattagttcctttgagattcaatttgttgaatatgtgtagtttccatcttccttttcatttccctgtgattttaaatttgttcccttgtttacatgtattattttatacttt

SEQ ID NO: 5021 - DNA, 689 bp, Glycine max
atatgcaagaatgaagtcaaaactgaaaaaactttaaatgccggtgcatattgcaaacaattttcaagatgtctatgaactagtcatgtttgaataagttatcgataaacacttaagggaaaagaaaattagataaaataattgaattcctataaattaaaatcaacttatgtatttaacttttatagttcccatcttacttcttcaaaagttgaggtatataagatgattttaacttatgagagaagttcaattaattttatttttatttttctcttataaatgattatggagaagattatttaaacagggctaatttatatttttacttctggttgaagaagttaggttgctatgagcctgtaataatcaaaggaggatatggttgtggatgttagtaaattttgatcaaaatgtcactcactgtgtagatgctcaaatagtgttccatttggagcatactcaagcaccatcattcttgagaatggcttattctcttcacaatacccaatgagattcacaaaattcttgtggttcaccctagataatgtcgcaatctgcaaccatgcaaagattagaagtaggatcacaatttatggtgcatttgctacatttgttgctagcttaccttctttctgaattgagcttccatactttttgaccagtttttagctgtgtcactgcaggca

SEQ ID NO: 5022 - DNA, 738 bp, Glycine max
ggagctgcggccgggatgcctcctctagagtcgccctgcagcttggcccataagattaatagtagagtcttgttggagactaatgtgaaacagagctggatacttgtctctgagggtaaggtcttcccccctccaattgtcccaccagaactgaaccttagccccattacccacattccacctcaagtttgtggttagaatagaatgatattgctgctggaaaacagattttaaatccctccaccaagaagagatgtgggcactgtttctaccatagagtaaggattgccaccctccatatttggacaccaagattctggcccaaagctcatgctgattatttgccaagttccagccccatttaccaagcaaggcagcattaaacttgttcaaatctttaatacctaacccccctttgctcttagggaggcaaacattgtcccatttgacccaaggtatcttggaagaaacattatcacctccccaaagaaagttcctctgaatagaaacaatcttgtggactacttttttagggattctgtaaaaagacagcaggtagataggcaatgctgtcaaaaccgaattgattagagttatcctgccccccatcgatagacacctgtgcttccaagaggccaatttggattcaaacttgttgatgataggttgccaaacactcctgcttgtaggacttgaccccactggaattcccaagtaggagaaaggagtgcccgtctg

SEQ ID NO: 5023 - DNA, 789 bp, Glycine max
tgccacgcaaaacagtgcttacggtaaacattagtcttcatcacagctcgtgttgttctctgcattcctcacttatgatgtattcaaagcttttgaaatggttgtgcattttgttttgttatgttccccagttccgcgtatatgtcaacaaatgtttaggtcgcaagttaaacattcacacacacacatattttgtttacttgtcatatgtaatgtctccaacaatttaagaaacaagtttgcatttccagttgccatagtccatggttggctggccttctgcactatccttattagatatacatattcgtttcattttcatttgtaatcgtgtttagtttctctgtaacagaattagcttttctgttattatttagtttcttgccgactcagcatataatattcatctctgtaattttcaatctaatgatcagataacatcttcccctttcttctctcttacctaaattctagtaacccataaagtctagcattgccgttcattcccaaaatagggaaatggctcataatgctgaacttgcacattttccttgggcatgccttattcttattgacattgtttgttgttgtgactacctttcaagtattgtgagatagcagcatcaaggtatttgaaaatatcagtctctttactgatcattgatttttttttatttttttttaaatttgtctagttagtttttttttggatgagatatacttccttgaaaatattaaagtcagtagcgtatcctttattgtgttacgtgttccagaatttgccgagtc

SEQ ID NO: 5024 - DNA, 850 bp, Glycine max; identical to SEQ ID NO: 2330

SEQ ID NO: 5025 - DNA, 662 bp, Glycine max
tgcctgcagagtgcaggccagagcggatcaatccatcctaccgaccctttactggtatttggcactagcaactagtgctggacctgtcgagttttccgacaagcagaagaaaacaaaaaaatataagctgcatcggtacgtgacaaaaaacacatcctccaaattcaaatcatgcctgcgtcatgcttataacttattataacaccgatgatttatatagcacttatcttgctaattaatgaaaagttgacgaaagacgaaaacgtatctgaaaaaatcacgcagcttgaaacggaataattaatggaactacctgagctctgaatggacaaagttggagacaccacagacgcatagggagtgagtggaggcgtaggcggcgaagaagacacaacaaccacgtagctattgctgctaccaccttgggcttggtcctgggcccttgcgctctcttgcgctaagacatcgcaaaatgctctgtgcgtgatgaaactatccctcctttaagaaagatacacgtattactgttagcgacattacattgaaaaataaaaaagacaagtaatgaatattttcattttgatttggatacctagagaacaaagtggcgcagtcgcatcggtacttctttgtgccacaagttttcatatgagccttccaat

SEQ ID NO: 5026 - DNA, 792 bp, Glycine max
agggcgccttgcaactcgttgcctgcagctgatttattggctctcaggcagtcataaagatgaagagctttaatctgccaaatcatcaaagccataaaaacttgaataaacaagcaaagcacaaaacgaatgaagagataaagagagaatataacgatttgagcacgcatgaaactttgcaaaataaattaaatcaaacagaattacataacaattattgcattacttttcgacatgtttcttcatgaaactctttcttgttaggtgccttgtgaaaatacaggtaacctccaaatatttcatctgaaccttctccagaaagtaccattttcactcccaaggctttaatttttctggacataagaaacattgcagtacttgctctgatagtcgttacatcatatgtttcaatatggtaaatgacttcttcaagtgcatctataccttcctgatacagcaaaacaaaaaattacttctgagtgacaataaaagaactcatttgaaaaaaaataaaatgaagagagaatgagagatgattacctgaaccgtgaaataaagttcatggtgacgagtaccaaggtaatctgctacctcttttgcagctttcaagtcaggagagccctgaatggtggaactgtcagatcatgaagcatacaaaatctaatataatagcttccttgcgttgaagaagggtaacacaactcattctgacctttaaaccaatgcagaaagtatgtaactgtgatccccatttgacgagcagattcagattcagccaaataacgattgacc

SEQ ID NO: 5027 - DNA, 893 bp, Glycine max
gtagtcagaagagttcaacagaagctccggtgcacggtaccatctcgtaacaacatattcagtcataaaatcagtttcagaggtgacacgagccagtccaaaatcacaaatttttaagtcgcagttggcatttaggagaaggttgctcggttttaagtccctatgcagaacattagcagaatgtatgtacttcaacccacggaggatttgatacagaaaatactgtgccaagaaaaataattggtgtcaaggataagattaaataaactctgcaaacaaaataaaaaatgagacaattatcgaatcctttcctcaagtcatgaaagatgaaactcaaaaactcctctattacctagtatctcaatttacagtattactgtaataggattaggatgtgagaaaaagcattgagcaggtttggtgaaggtgaaggtaaaggtaaagacaagaaaaaggagcaagaaaagagaaatttctcccaaggcatcttaagaatacgtacctgacagtgctcctctgataatgcttgatttgaacgaatgatttggtgaaggtcagtgtccatcaactcatatgcaatgtaaacatcattgaatatctccctttgaggtggtggcactatatccctgattgcaacaacctagacaataattacaataggcaaaaaaatgttaagaatttttcctgatgctctgaagttgtggcagatcccatcacaaagttatttgggcaccccctctccccgtatttgccccacaaaatataaggaatatatatgatttccacaggctataaatggcctaaggatgaacacctttttgttcgttattagaactgcaagaatactaacagtaagtgtcgatgtgcatgacagacagtcgacaaattttttt

SEQ ID NO: 5028 - DNA, 770 bp, Glycine max
tttcatggatgcatggagagcaacatgcaagtccaatgtgcaagccaggcttctgatccctcagggaagattcgtggtttcaacaatgttttttgcagggccatgtttgactccagggcccataacaatccaagttgtaggcactgttgtggccacaacagatatcagtgagtatgtgaatggtgaatggctcatgtttgaggacctggatggtgtaaagcttattggtggtggtacttttgatggcatgggtaaggaatcatgggcaacaactgagaactgtgaagcagaccaaaccgacacttgcgtcagaaaccctagtgtaagtcaatatctatttaacttatgaacacaaacattctttgatactctctttctaatacattctctctcttatatccgttgaaattcatgtgaatcccaccagtttgaaaatgagatccactaaatgagaaatgagatctacatgttccattgaactaacataaattttaatgaaatcaaatgtttttagtcttttaaaacatttcaaaatgtcatcttgtcattataaaaatttaatgtgtttagtccctacattttaacagaaacacctacttttagtcctgatgaaaaactataacctcgtaactttcgttaaatgtagacaaaaagacatactattaaatttttatagaaattaaaaacaaatttcgaaataattttgaggacaatagagaaagtgtcaaaaagagaaccttagagggtgtgttttatcttaatttgatttt

SEQ ID NO: 5029 - DNA, 731 bp, Glycine max
tttcatgcatgcatggagagcagcatgcaagtccaatgtgcaagccaggcttctgatccctaagggaagattcgtcgtttccacgatgtttttcgcaggaccgtgtttgactccagggcctattacaatccaagttgtaggcactgttgcggctacaacagacatcagtgagtatgcgaatggtgaatggctcatgtttgaggaactggatggtataaagcttatcggtggtggtacttttgatggcatgggtaagggatcatgggcaactgctgagaactgtgaagcagatgaatccaacaattgcgtcagaaaccctagtgtaagtaaatatctacttaactaatgaacaccacacgttctttgatactctctttctaatacactctctcttatatcggttcccattagtttagaaataagatccactaaatgagaaataagatctacatgttcaattggactcacaaggattttaatagagtagaacatatttttaatttctcaaaacatttcaaaatgtcggtttttgtcattataaaaatttaatgtgtttaatccctacgttttaacagaaacacctagttctagtcctgatgagaaactaaaaccacaacttttgttaaatgtagaaacaacattaatcaaatttcgaaataattttaaggacaaaagagaatgtttcaaaaagatagcaatagaggggctgtggtttctcttaatttgatttt

SEQ ID NO: 5030 - DNA, 646 bp, Glycine max
atcctattgaactcacaggattcacataatcactctcgtaaccagcatacaaaggtttggtctctaatttggcagcaacctcttcttctgttatagagggattggaattaattgaggcaattgattgtgattgatcaatctgaatgtgatgctgtgtaccattaccatgcaatggcaactggcagaggctatcctctaattgaacaggtgtcttctgttcttctttgagtggaccttttggaaactcactccaagagtattctgttggtatggtgcaatcaaagactgcatggtttgcttctgatgactctacagatgtaaaaggtttgttgaggctcttctgcgaacttttttgtacctttggatccggaatttcactagtggaagctcttcttttttctgttgtaggctctgacacaattcccttgagatcaccttcataacttgtagcatccatctgaattagtaaagttccatctgaataactgaagctgtcagtggcaatatcattttgttgcttgtttgcagtgttcagaaaactaaaacttcctagatctttcgaaggtgaatccgagtgctttattccacttgatgaagatttctgatcattttccttttgcaacctactcaagtagagcctgtattt

SEQ ID NO: 5031 - DNA, 829 bp, Glycine max
taacctttcacaactttctttccagatcttttgtgatttttggcccctcaattctgtatccattatggacagatggactcaatctcatcttagaaggtccagtcaattatttgttatataatatttaagaaaatacaattttctctctctctctctctctctagttttgtttctctttccatttttttccttgttttatctatgattcttgattgctaatatacaaaatgagtttttgaagcatcgaggctcgtacctgatccttttgtacccgttgacaaaaaatggtaaggattaaaatcacttgcatcactcccccaactagagtcatccttgtgtaccaattcgacaggtacaaccagtacagctccagcaggtatggttaaaccagttgcaaagcacaagtctgacataaggacaaacattaatgattacaaataaaaacaggagtatggatagaaattttttaaggcaatcctaaactagattttaatccattaagaataactatcaaaaataattattccaaaacatgcgcgtaaatcatactggtattgccttaaattaccacaaccttcctctcaaactagccctatttaatggatcgtaggaactagaatattcaaatttaatatctgtcttttgaaatcatgcataagcacatgtatgcagtgcccacagctaaacagaaaacttgcaaagattacaaatcagttagattttctacacaagaaactcagcctgaaataaattatttcatataatgcacagtaaagtacacccatgctttcttaagcagcaatatctcaccatgtttcaaagaacacct

SEQ ID NO: 5032 - DNA, 760 bp, Glycine max
cagtcacataattaaaccaacagacaataaggccagggaaaaatagacaataaatcaacgaaacaataggtgacggggacttacattggtaagaactgcacataaaatccaaacatattgtataagaatgttgactgttccaactgactagaactacagtgtttaaaaatatatgggtcaaaagaacaacaaaatgcctgaattttcttttcattttttcaagaaaacttaactgcatgagaacaaattatacctggaattaattttcaaggatgaactgatataattttcaccaaggaaggcaaagagaagctgaagacgtttcctgaattccccaatactggatgtttgaatgaagtcctcaaggctgcaaaataccaaagtaaaaagaaatgtaactcaacaaaaccaggtcacaaaatctataagatgaaactacaaatttagtctgtaacatgcctttgaataattgatatatcacaagacctgggttgaagaacagagtacagaggaaaccacaactgcaacaaaagcaaaaaacaaataagcaatgttcagattaaaagaaaaaaaatattgatatcaaatttttgcctatttccataatttccaaaatatacaactgaacatcatttcttaaagaaaaataaaaagatgggagttgtagatcctttgttttagaaaaggaataatattgaaaagatatcaaccccacatcacacattgagtggcaaatcctaaaaacactgcaggcacacag

SEQ ID NO: 5033 - DNA, 784 bp, Glycine max
actctcctccgagctcgccctctcgccggagtgctcctcggttgtcgcgccggcgatcatgccgtatagaagcatctcctccgggtcgttctcgttgaagggtaggtacccttcccacgagaaggcttccggagaggaagattcggagcagaaaccggaagagggtgagttgaagaaggaggaaggtgaatccatgtgttagagtgtgtaaggtaaggggaaacagagtgaagaattgagtagttgctctgttttttaagagtggagaattgagatgctctgttttttctcggcacttttgcacccaccagccccttatatacccggttctggcctcggtgaaatggtaaaagacgccgctaaagcgaatgggataatataaagtaaccattgggtgaaacttgaaagttgaaagaaagccaaaaggggaaaagacgggaaagcatcagcatgtcatgccatgctacgacaatcttatataatagtcccttcaacaagacaaatttgtttttcttagggtcttacacaaatatttaataacttcgttatattgtcctatcatattaataaataagattgacgaagcaacataataattttatagatttttatgtaatagaaagttataatcaaattatgaaactgcactaatatgttattgatatctctcaggaaaataattgggacgtgtggcaaataactaacaagatcaggacgcttcactcaaatattatgatccagttgacgcaagaaaatcattgattgagaaagccagctgcaggca

SEQ ID NO: 5034 - DNA, 762 bp, Glycine max
ggctgttccaataagtattaatgtcaggcgaaatacaactgcaccagcaataccataggaaagcacacgattctgtaagttcaataagtaaatgaaaactttgttaaaacattattaacaagttcagaatagataccttgttaaaacataaagtagaaattgatcagtttacgcatgacaagttttatacatcacctgatatgcaactggcactttgaagtaattgaatattagaacaaagacaaagagattatctacagaaagactttgctccaatatatacctaagaagtacataaaagtcaaaggtcaacatcacagtcagtacaaagctcaagaaagtcgaaaccaaagcagagagaactatgatggtgtgccatcatagttcaaactataaagtattcgtgaatcccaaaataaacgtccaatacgctataatttcaaccacgtggtgtttgatcaatctctaggagatatactattctaaggccatatatagaggagcagcaaaggcagaacagagagagagagagagagagatgatggcatatgtaacactctaaaagtaagctaaaagaaactttgcacaatatcaactttgactcatccagaacattaattattccagcactgtaaaattggaccaactttctagttgataacgaaattaagttattcggcatacccagcaaagaatcggatgccttgtcaaaacctccttaaaacccaaaccaacaccaaatgccactgcaggcagcaagta

SEQ ID NO: 5035 - DNA, 795 bp, Glycine max
agttatcacaaatatatatatatatatcaaaaagagaattatataactagtctgagattgcaatcatactaaaacaatcaaattcatagacaatttccatggcaataaccattaaaagtacaaaaaaggttcaaagataccgtgttcagtagatagatgatatcaagcaacatataccaaagaattaataagagattttgacgacttcttaaccatatatcaattgatgtcatttacaaaagtcatgttaagtaccaccatatgttttggatgtgataaatagatataatcatcagagttaggcaattatgctacattaacaaaatatacaaactgtcacaactcacaagcatggtttactcctttcgactacaaccgtgtgacttaatgcaactatttagggaagaaaaagtaaaaaggaagacaaaattacttagtattttctctgggaggtaaccgattattcaaaacacagtccagacaccaccaggggaagtctttctcatccttggttccatttaaatcagtaattttttttctccacggacctccatgagtgccctcagtaataatggaaggaggggaagtaactgagaattcaaacggaggataaaccatagcatcattctcagaactaccatcaacctcaattctagaatgggcaagactcctagaagaaatatcctttccagataataactccccattagctggagctggggatcccattctttgctttcgttttctcaaccaatgagccagtagccctttaagggtttctcgagccaaattaat

SEQ ID NO: 5036 - DNA, 770 bp, Glycine max
acatctggtgggcaccgtggcattttatctagtctgatgcaaaaagccattgactccgttactagtgatacctcaaaatggtcagttcattttgcagaagcactattgtctcttgtcactgtgttggtttcgacatcgtcagggtgctctgccatgcgggaagcaggatttattcctactctgctacctctccttaaagatacaaatccacagcacttgcatttggttgaaaaggctgtgcgcattttagaagcttttatggattacagtaatccggctgctgctctgttcagagatttgggaggcttggatgataccatctctcgcctaaagattgaagtctccaatgtagaaaatagtggaaagcagccagatgataattctgagtctagtgcaagtagtgtaaatatggttagaagttcttcaactgggccagatgacacacaacctttgtattctgaaccattaatttcttatcaccgtcggttgctgatgaaagctttgttgcgtgctatatccctgggaacttatgcccctggaaatactgctcgcatctatggatctgaagagaatgtgctgcctcattgcttatgcataatttttaggagagcaaaagattttggtggtggagttttttctcttgcagctactgtcatgagtgacttaatacaaaaggatcctacatgttttcctgttttagattcagctggtcttccgtctgccttcttggatgctataatggatgatgttctcaactctgcaggcatgac

SEQ ID NO: 5037 - DNA, 711 bp, Glycine max
accatcaaagattttttttatccctccgaataattagcttggcataaacataatcaacttcattttgtaccatgctaattaacctctattgatcactgatcagagtaaacaatgacgaatttgacaagccaagcaaaattaacaattaatccatgacatgatcaaatcatttgttgcttttcttggccttcccaacacgtaaaaaagaacccaacccgaagagactagtaccacttcctttagaaatgcaaggagttggtaggttcaaaacaggactaatccaaagaccattggcataagatcctccataactcttacttgaatgagacctttgtataggatacaaatttaaggtagaagagcttgaagatgatagtggcttagcttgatgcccggttgaactcactctctttggctgtggcactgaaccagctgaattgctccttgacaaaggaggtgaataacacatcaaacttttctttgtatcacaactgagacttttgcttctactgaaaccccagaaagaggtggagtaagttttcttatcatgtagaacttctctagtgctctctttctttattttgtcaacactagaaggaagtggaggaagtctcatatatggagcttctccataaagggtgtgtttcctagtagtgtttctctttttctgcatctgaatgggaacgatcaccccattggagaaaagctcat

SEQ ID NO: 5038 - DNA, 691 bp, Glycine max
tattcccgacgttgttgttgtcatcagagctatgtcattcgtgttgttgttcttttggtgttataaattttagagtgccatgtttgtatgtgtgcaccaaatgaagttaaatattcattatcatttaatatgagctgtgctatgttctatgtgttttctgtaggttattgtactttgctccttagatattgtggtcttcataatgaatcattgtttcaattgaatggtgtaccatggtggtaaattatgtagaggcgataataatttggaatttatggattttgaatctctttggaatttgcattgaggatatgtggtcgtattttttagattttgtgaatgttaagggaactgaattgtccaaaaagagttgtattatggtatcgatgtggtggggaggtcttgagtgttggtttgaaagagtttaaggatgacaaaggtgctttagagatggttggcattgcagctggataggaaattgttcatctttatgtcgagcatcctggggcagaggctgaagttatcttccatcttctaagctgtcttgatgatgatgatgtacaagttgtcaagttgtagtcaatagtaattataaattatcttgtatgcttctataaatttatagttatagttttttgtaattggttttagttatggtggttgtttacttggttagattttgatacttggt

SEQ ID NO: 5039 - DNA, 784 bp, Glycine max
tgttaattctttggttccaaatggtgttacaaacattgttgaaggcttgaggaaaggtgccaaagtgtttgttgaccgcaagtggaagaacccagttggcagtatcatattactatctgatggacaggattcatccataaacagtagcagaatcaatgttgtaaatgattaccggtcacttgtcccgtgctccattcatcggaacaatggaatgggtctgcatataccagtgcatgcatttggctttggtgttgatcatgatgctactgccatgcactcaatctctgagatatctgggggtactttttccttcattgaagatgaggatgtgattcaggatgcatttgcacagtgtattgggggactattgagtgtggtggttcagcaattacacgtagaagttcagtgtgttcaccgttgtctgcaacttggttcggtaaaagctggaagttaccaaactagcttgattgacagtggaaaaatggcatctatcaaggtaggagatctgtatgctgaagaagaaaaagactttttggtgacagtcaatgttccggtggataagtctagtgatgagatgtcgttgatgattgttagaggtatttatagggaccccatcacaaaagaaatggtggggttgggagtaaatagtgaagtaaagattcaaagacctaatgtagctagagatgtagttatgtcaatagaagtagacaagcagagaaacaggcttcgagctactgaggcaatggccgaggctagagttaaggctgaacgtggtgatttgtct

SEQ ID NO: 5040 - DNA, 798 bp, Glycine max
caatatactgaatgttgatttcattttctcaattcaagaaacctttctttttgagtggtgagaaataaaaatttacctttctcctttgcccctcttttattattttgaatggagtcttgcttcttactttgtaaaattaaatgctactcacactttaatgcatagtgtgattgtcattctttgccaatgaaagacattttgatgcaattgaagaaagaaatgatgtatccacaaaatcggaagctagctcagccacctgaaggtaaataattcaattaatacaactcaacatattatattggtagagacatacactgtcacatgtttgcaggcgtacacaaatgctcataggataaatttgtatcttcaaatgactgataaggttagtatcattgaattaatctttgaatcgatattttagtctacataacttcacttccaatgcttggtatgaaactctgctgccatgtgcaggctcctctatttaaatccttgtgtgcccacaaattattgtcgacattgaattattactgtgatccgttgttccattcaattcaattcactaaaatttgtctttctcatttctattcttgattcctaacgaggtagtttatatagattatcaacttgtagcttatttttgtatcttccatttttctccctactgtttgaatacactacattttttaccctctcttaatcatttttacattactctctaactatcttagtttttaatacacttcttaatcttcagtttgttacttgttttgtgttgactaacctttctttgtcatt

SEQ ID NO: 5041 - DNA, 686 bp, Glycine max
atgcctgcagcacagctcttcatcaaagaaccagagaagaatgtaaactatgcggtcatgtctaacatttatgcttcccatagacattggtatgatgtggaaggagttcgaagaatgatggggaacaagtgtgatgcaagagtcccgggttgcagctggatagagattagtaatcaagttcattcatttgtatccaatgataagacacaccttaaagctttagaaatgtatgctacattgaaaatgctgctctggccaatgaaggaaaaaagtggtatgaattcgtgaaggatacatcagtctatgatctacgtagtgtgcacttgcatggattatccaattgaacaaaatttaaatgcagttctttacatgtttttggtgttgttctcctattaaaattcaaagttttactttggtaatctgtgtattaaaaatttacattaaagaccaacatatgttactgaagtgaaactacaattttgattggagaacagtactaaagtacataaagaacatctaagtaacctttccttcgaaggtgggcacctaaaccttaagtggtggtttagaatttggatatcaatgttgatgtttgaactaacatgttaaacaaacgttccatccatagttatttcttgttatgagtagagcaatatccagagttttttgcatctaatgtcaaattt

SEQ ID NO: 5042 - DNA, 705 bp, Glycine max
ctgcactaagccctcacatatttactaaaagatgaacaaactacaatttttgtattttcctagcaaatataatcaagatggatttcctcttcttccttgcggccttcaatctttcccagttgagctaagatatcttgcttggatgcattaccctctgaaatccttgccagagaatttttctgtggaaaacctggtatattagacttgtcacataaccaagtggaaaaactttgggatggagtgcagggtaaacaaacatgttttcctgttataattttcctgattcaagtactacaaaattgacaacgtaggctcatatgtcttcgtttgtattatcttgtcatagaatttggtgaatttaaaagaagttaaagtctctggttctgaaaacttgaaggagctgccagacctttcagaagccacaaatcttgaagtgctggatatcaatttttgtcctcagttgactagtgtgactccatctattttctctctcaacaggcttgagagattgtctgtagcttattgttcccttacaaaaattaccagcaagaaccacctaagctcccttagatatctcaaccttgagtcatgcaaaaagctaagggaattttcagtggcatcagagaatatgattgaactagatttatcatccacttgtgtcaatgcatttacctcatcttttggatgtcaaagcaagctcaaaat

SEQ ID NO: 5043 - DNA, 754 bp, Glycine max
agtgagcttatatattgtatcctctttatgaattctacactagtttttctgcttcctgtttctgtgccagcattgattaacttgctcttactaattgtatgaatatgaataagaatcgtgtcagtactctttggtttaaacacctaacctaatatataggaaaaaaaaaaaaagagaaagggaggatgagatagatctatgcgataaaaaacaaagactgataaatatgagtgtaaaaactgagatacaaaataatcataatcgttattgtatattagtagctagatttctcttttcacttcattttgtttgagaaaaaagtgaaagatatgaataaactcatcaattacaaagataaaacaactcatcatcatgtaaaaacatagttgaatttttcttctgattatttttatttttattttgttatctgtacatttttccttctctggatctctcggagtgaatgaagagtttctgaaagcaaggatcattgttcatgtagccctaaaatggaacatggcagataactataggttcttggcgttttcctttgattacttcaaataatttccttataacattttacttgtgtgcataatatttttataactaatattgcctttttactttatgtttgtagcttctgctggtgacttagaagttttgatatggttttctccattctgaaataaaacagaattagttgcctaaacggagttccttactaaaggtacttttgatcatgcgtatactt

SEQ ID NO: 5044 - DNA, 814 bp, Glycine max
agtaagcagtaagaatgcaagggcaagctctttcttatatatctggttcattttctttacaggaactgtttcttggcattcctttattttgttaagctcagaaagtccactatcagaagtccctctatgaagttggagactcattgcctttgaatcccgttcttcggcagctaataggtcaggctctgatgcccgacctgcttttttggtaacaatccattcatatgaacttcccaactggaacaaaccggacaccatggcattgaatttggttactgacattgtgttctcaaaaaggaggtaaggaacaatgaaggggaaggatttcggggcaggaagaatgttcaagaacgacatgaatacaggaatataacaaataacccagattggaagctcagcttctgggacaaacattgtcaaaggaagaataatgcagaataatgtgaaagaatagaatgggaggattagctttctaagcagaaagaatagaaatattaggttggttttcttccagaaagcaatctgcaatgttatgaaatcagaacatgtttagattgtattttacttcaaaacagtgcatagactgacaataaagaaaatacatcaccttagaggttataatcgctggaaggcacaaacgaaagagttgcataggaccagaatgccatcgatgttgttgtttcctataagcttcatatgattcaggaagctcacaaagcacctgaaagaagtttctttagactaaaactgcaacctaaattgtacacatcaacagtttttcaccccaaaatttagtgtagcatgcctttcaatt

SEQ ID NO: 5045 - DNA, 701 bp, Glycine max
aggttagcacaacagacgataagctccccccgcttgctctttttaggagtgagatgaaaagatgttctgagagcttacatgttgctcttgagaactatttaatagctgatgatgatcgaagcttaaatgtatggagaaaacttcaaagactgaagaatgtctgctatgattctggttttcctcgtggggagggatgtccttgtcacacactatttgcaaattggagtcctgtatatttatctgctgcttctaaagatgagtcggaatccaaagacacagagccagccttttggactggtggtcaggtaacagaagaaggcctaaagtggttactggataaaggatataaaactattatagatctcagagcagagactgtaaaagataacttctgtcaagcggctctgcaagatgctatttcatctggaagaattgaattggtaaaaatcccagttgaagttaggactgcacctacaatggaacaggttgtgcagttcgcatcttttgtttcagattgcagcaaaaggcctatttatcttcacagcaaggaaggagttttgagaacatctgccatggtctcccgatggaggcagtacatgactcgatcttcatcacagattgtttctaatccaccagttacaccctatgacatgttattatgtaatacaaatggttctgcaaaacctcaggactcttcagtg

SEQ ID NO: 5046 - DNA, 687 bp, Glycine max
aagatcaaattggattttcacttttcttccttaatgttggaagactagaaattgagaatacattgcaattttgagaagctaaggaaactacaaagcttatgagcatgtcatattaaggacctacttcaaaagaatacctaacaagttttaacatgtatccagataatacacgggagcaatcaattgttggaaataaaatcgaatatatatgcacattttaagggtaagtaaactaaaagactgaaagagattattctgtttaataggattagcccttaaaagtaaaagaggacacacatgaaaatagacatgatgttaaccaagtcaagcttgttctaagcatccactttgtttttgttttttttaactcaaaaaggtatgtactactcagttaagttttaaaacatgcccccagtctgggttgacaattgcacttcttgatgttaatcattaaaacagattaggccttgaaaaaaaaaacatggtagaactagtgatgtcaaaaagtacttaattgccaaaatttgaatggaggatatggctttttcttgagtgcaaggacatgaataattaatgtaaggataattcaatcaaacgttgagattatacttcctttaggaaacataagaagaaatctggcactggcagtaattgaaggatttcattacttcctttttatattgtaaa

SEQ ID NO: 5047 - DNA, 712 bp, Glycine max
acctccgtaccttgtgatgcctaaacagtcgacctgcaggtacccaaatttgtcactggaatgcattaacatccacgaacactgaaatcttggatttggaagggcacgttgctccgtctgaggtaatatatataacaatttttgcagtgtttcgttgttgaaagcattacctcaaaaaaattaacaaaaaagataataatgtgtattgctaataggaacatcctggagccttcatggaaggattgactgagacacggcggattgatgcaatggctgtaggccataagttgttgattgttggaggcaatgaaggacaactgatttgcaaggtaaatttcatctctgcttttaaacactaaatttatgttttagtatacactttcaacttgattaaataaatggaaacaagtgaagacagccttagttttattaatttattttttattttccaaatcatcatatggtgcaaaattttcttgttactgaacaaaaacacgtatatatgtgtgtgtgtgtcttgcagcacttggatcgtcccgggatcagtttttgtttcagatcagatgatccaagaatgataaatgctattgagatttataagtgtcccactctcaccaggtctctggttattctttcctttattttttttaagatgttgcaaaagtgagtcacgaaccttgtgtgactgcttactaacaattaataaatttgg

SEQ ID NO: 5048 - DNA, 745 bp, Glycine max
atatagggataaaaaatcttttagacaaagctcttatcactactactacagatatgcatgattctactacagatagttgcatagatatgcacgatttgatacaagaaatgggtagaggaattgttcgtgaagaatctattgacaatcctgggcagcgcagtagattgtgggatcctgaagaagtcaatgatgtactgacaaacaatacagtaagttaatgatacattgacttggcttcctaaacaacgtgtctctgcataaaaaaaaaaaatgcaaatcattactaaagaactaacattaattgtaatttctatttgtcagggaactggtgcaatccaaggaatatggttagaaatgtctcaaattcaagatataaagctaagctccaaatcattcagaaagatgccaaacttgagattacttgctttccaatccctgaatggaaactttaaaagaattaattcagtgtaccttccaaagggtcttgaattcttacctaaaaaattacgatatttggggtggaatggatgtccattagaatctctaccatcgactttttgccctgagaagcttgttgagctttccatgcgatacagcaatgtgcaaaaactttggcatggagtccaggtatgcaaggttcacatatcgattatgtatttatgttacagttttgcctttgatagaaattgaagtctaaaatggaatttctaggaaatgtactaacttatttagtcctttatatgtt

SEQ ID NO: 5049 - DNA, 778 bp, Glycine max
gctcgcctgcctgcagccttcatcatgagctatttttttttctatctgtcaattctcatgtatgtatgtgtatatatatatatatatatatatatatatatatatatatatatatatatcagcaaactaaggctgaggatcctttttgtgtgcatattttcatactcaaacatttcaagattgtcttaaaatacaccaatggttagcttgctaacgcactcagtgcgtacattagcaaatctcatatatacacaatattgatgagtcccattagatgcaataaccccaaaaagttgatagcaaatctatcgaacatgaagtcaagaagctcaatctagcaatccccctctggtaggtaaaaaggctgtactgatgtttataagcctttaagccacatcaactaagccattttgttatgcaagtatcatcttaaaataacagaggcactgactcaccaaatcaataataaaacaatgccaatttgttaacagtgcaattttattgtatatccatggccttcctaataattatttattacaaattgctagaggattccagtaaactcaatttcattactctatcaagaaggtccttaaaattatcaggtcccaactctcaaactatttaaacagcctcctacttggacacttttgctacaaaccagcacagtatattattgaaaaagctcagctcattgtaaatttctgcaatcataaggaataagaaaaagattgttcccttcctcactcctcaaaatggaaagattaaaggaaaagag

SEQ ID NO: 5050 - DNA, 662 bp, Glycine max
aacggaccctagatgaaccccagcaacttcaagaatgaacattggaaatgttacatgcaatgaaagacagaactgtcatcaaagaataaaagaatcatgtcagctactgaaatagataaattcaacatacgctaaatggatttgcgcaaaggatgcaaacaatatagtttgtcatttgagaattgcaccacactaccacaggtcagaaacattttctgtttttcttccttttcttattttcagttatgcttgcatgaatagccccaaataagaataaaactgcacttgaaacctgaccaactctaactaaaggaattctacgtgcatctgaaaaccaaaactgacatggaccttagacattttgtgtcccaccaaaacaatgttatgactcgagttttgaatgaaaattcttaaaaggatgggcaaggacagctatgaaaacagttttaaaaaataaaaaactcaggtatcatgataaacagagaaaaacgtggcaaaatgagatagtatgcatttacctccataatgtttcatagtttaacccttacggccgtgaatatgaggaaatgaagaaccagaggactgagaaagtggcctttggacaaatgaatggtttaaaagttgagcagcagtgggacgatcatttggattaacttgaaggc

SEQ ID NO: 5051 - DNA, 685 bp, Glycine max
gccttcaagttagtccaaatgatcgtgccactgctgctcaacttttaaaccattcatttgtccaaaggccactttctcagtcctctggttcttcatttcctcatattcacggccggaagggttaaactgtcatcttcaactatgaaacattagggaggtaaatgcatactatctcattttgcaacgttttatgtgtttatcatggcacctgaatttttatataaaaaaaaaaactgtttccattgttgtccttgcctatccttctaaaaaatttcattcaaaactcttgagtcataacacggttttggtcagacacaaaatgcccaaggtccatgacagttttgattttcagatgcacgtagaattcctatagttaaagttggtcaggtttcaagtgcggttttattcttatttgggacttttcatgcaagcataactgaaaataagaaaaggaagaaaacagaaaatgtttctaacctgtggtagtgtggtgcaattctgaaatgacaaactatattgttgcatcctttgcgcaaatcattgtagcataggttgaatttatctctttgagtagcttacttgattcttttactctttgattacagttctgtctttcattgcatgtaacatttccaatgttcagtcttgaagttgctggggttcatctgggtccattgctgcaggc

SEQ ID NO: 5052 - DNA, 814 bp, Glycine max
aggttgtcatgatgttcctgttgtttgttttcaacaaaaaaaatcagtaaccatgagcagagaaaccaaacgaagcatataaataggagtcaaaatgtcaattgaaaaatgaaatagttatatatataccatgggtgttttgctgtcaactctctcagttctttcatggattcaggttctcttgggtagacactggtctccagaatatactaaacacaacataaccattttatcaaacacccccccgaaaaaaaaagatttttgttttcaacataactattatataaaataaaataaaaaccaaaagaaaaaaagatttttttttttcttttttaacaaaggaatgtaattggggtggtacctggtaaagagcatcactctggagaaggctcttgtggccaacctcttggtgccttccagcttcagttgtctggttttggttttgttctgccattgctataataatcctttgtgcgttttgtttcctttccttttcttctcccttttgaaagagttgataattggagcttgatgaagtggggggatgtaggagagtgattgatataaggaaggaaaaggccggttcgaaccggtgtgatgtttggttggaccggttggcgtccggtccggggttggcgaggtttgtcttatagtaatgcttgtgcattgagcagcatggtttaggcatttaggctccacagatccatatgctcttgtttgcttcatttgttggtaagggattttctgcatttatcgaaataggctatgacatcattttaatgaattatgacattttaaatggaacataaatgtt

SEQ ID NO: 5053 - DNA, 799 bp, Glycine max
tgctataggtgtgatattgtctacaaaatactgacttgacagatgtcagattccactttggcccgatagccagaagtgcataagtgcaagattagctgccatcaactactaaagtcattattaagaaaattagtcattaccttttcagaatcttctttctgctaaaagaacttcaggtattttagaaaaaacaaaaaatatcttacacagactgatagacacaatacatgcaaatatcttatacatggtacagcctttttgacaattgttacacggaatttatcatttcacactagtcattattactatgtcaaaaaataacatttaaatttaactattttctaaccattaaacaagtaaactccaaagataaaggagcaaacagccaacttgcactacatttattacttacaatccaataatttaacaaaaccaacacaaatcatattggtggaaaatcagaaattggaaatattaatagctcaaaaataaggaaatcaatgaattccatgataattctaccttgaccaaacaaaaaaagttatcatgaataattcaatatcacaacatctgattggagaggagtggaatagtggagcaagcatagaaattcattgaacatagaacaagacctcctccaaggtacttggaaaaggttatagcacaacctttaggcaaaaaagccaaagatgaacactacatagacctggagaaactagccatcctcaaaatttagtagatgaagacaaacaccaagtttaaacctttgtcaaaagaagatcatgaaaatgcgcacgca

SEQ ID NO: 5054 - DNA, 831 bp, Glycine max
gatatttattctcctcaggtgctttctttggatttccaacatctctaaatctctttgttggatactgttcttcagttatatcggatcccagctttctcttttcacgagcatttctcttaggattcttttcactttcctctgctgtcttggattcctgctgtatcctaaataactttagctcttccagccgaggggtaacctaagtaaggaaaggtagttcatggagtaaggttgaccatttcattagcagttaaaagacacatgatgatattagaatctgttattatgaacattaattttaataaaactgaggtgcccaacaagaggacaaatgcttggcacaatggtaaagttgttgccttgtgacctggaggttacaagttcaaatcctagaaacattttctttgctaaaaggagtaaggctgtgtccatctaccctccccatactcctctaggtggtagggtagagtacccagttgtacttttttaagttgccccacaaggcaatctaattgacagggattaagtctgccaaatgcttcatatagggccttccttatactcaagacaactgatgcaaacctccaggcaatcatacccaaaagctagacattaaggttagcatataacccaagattcacatacttctaatgtggggctcaaatctcataactcaggtcagaacaataacaaattaaaattttaactttaattgcactcttctcggaaaatggcgatggaatctgtttcatcatcaaggagaattgtgggctagagtgctggactcaaaatatggaggatggaggaacttggatgaggatagaaggaatt

SEQ ID NO: 5055 - DNA, 780 bp, Glycine max
atattgaagggaaacaattgggccaattcctctatatttcattaattttttaccagtttgatattgttatgaagttaatgaatttgtttcaattatgtttcctcaattttaatctccttttctcttgaatctattatgtcctacccctacccccatttctgcttgtatagcttgtttttctttcaaacccagttgttgcttgtgactttgttttgttgctcttctctatatgatcaatagttgtttctctgtcatttggcaatatttgttttggtttaatgcaaaagaaaaccctatggtatgccttggtttttatttcttttgtacgattaatttccttgtaggtttaatctgtcagggaagagcaataacggagcaaccaaggaagaactggaagagaaacgaagatcccaagtatgcaccctaagcttgcttttgtattagtccattctaatttctaatatgaattggaaggttaaacatgacctactcgcatgcaggtagtagcaaagcttcatgccattcttcggccctttcttctacgtaggatgaaatccgatgttgagattatgttgccacggaaaaaggagattattatctatgcaaacatgactgagcatcagaagaatttgcaggatcatttagttaataagacactggggaactatttaaaagaaaatatgtcaagtggtaagatttgcttccagtttttgctttcatgttgcaactcaatatcttatatcctcattgtatgaatattgatctgtattgtgctgcttt

SEQ ID NO: 5056 - DNA, 780 bp, Glycine max
aaatacgtgcaagccttcctattattcaaccattttcaagaaggcttgtccaagatcttatagttatgcctttgatgatggcacaagcactttcacttgcaaagcatatgaatacgatattgttttctgtcccaacagcaacgggtatacactatacatcatctcactcaaattcgattaatttcctttccctttcaatttattgccaattttccatactttcaagaaaaaaaaggaccataactaacattttatattacgacacaggatgagaagaccaaatcttgcatctcctccaccaattaggcaacccttttggaagcatcagcaggtcacttcctcatcaaatattttatttccctttccagagccaatctttctcttggttctcactctttctcatttgtaatataataacatcagaagagattcataagggctttcaaaatgggggggggggggggggaaggaaaaaaaaggcacaatcaatgagatggaatcgatggacagcaaaaaaatattacacttgaagaaccctctgaaaacaaatgattcagaaagcagtcttctaaagctccaataagttcggagcttattatgaacgaattgatatcacataaataccaccggtcataattccagtatactcactattatctcaagataacttgtaaatctagcaaaataaaagttaagaaggaaacaactagtcttttgcaatgtaaacaggaatataggaatcctcaaattcattctctcacatattctatagtacatgtt

SEQ ID NO: 5057 - DNA, 848 bp, Glycine max
cttgcatgcctgcaggcttcttcaaggtcacagccatcttcattccctacattgccggcattgtcgcggccagcacggtggccagcgctgctcacacccaccacctaggcctcatgatccgctgcttcacaggaccaaccctaaaaagaagcgaattctccatcaggcaagcagtctccagcaggctctccctccatgccacggcggctggatgcctcggagcagccttaatttcatcattcacataccatatgctccgggaactcaactacaacgaccgcgacgtgatgagtctctgggttgtttcaatcttcagtggcctaatttggcttgttggggttttgcacattgtcacagccataggaagaaccactgattccatctcattctcctcaaggctccaccctttctccatcttcaagtaccctcatgcaattggaggccttgcaggggttttcctctcctcattcaccaccatgtcaattttcactggaggagttattttcatagtgggacaactctgcattaagccactgcacttgctctatctctggctaacctacttcctttttcctcttgtttctttgtcactgctacaacccttgttgcacgtgatcaagatgaattctgtgaagatgcaaattgtggggtttcttttgtcactcttgtcatcagggtttggattctactacggccacagtcactggaaatggggccacttggtgctatttggtgcagttcaaagcacagccacagggattttatacgcttttggaaggctcttggtgttggactgtgctccctctggcaaagaaggtgcgttctccatttggtatgcttggatgaga

SEQ ID NO: 5058 - DNA, 879 bp, Glycine max
gggacagctgtgtgcctgcaggcttgttcaaggtcacagccatcttcattccctacattgccggcattgtcgcggccagcccggcgtccatgcttgctcacacataccacctaagactaatgacccgctgatcaacaagtggtgtttgatcacaaaatcttatacatgttgcagactgctccatcagcaacttgagatgcaaacaaagaaaaaatgtaggtgcagcagcaaaagagagagcaaatggaggaagtttcctctcgccagcatcagaatactgatgagtatcagcttgagtggacactttggaaatacccatgatgttaatccctggcctactcctcttctgcgtgacctgttgcatgatttgattcacaacaaaacccaagataagctaacttgcagtgactgttgtcttttggaagctttgatatataatgttgaattacagtaacaagtgttgagcatggcaaataaattcttaaaaggggaataaggctggggttaccaatcaggacatataggaaaataggaaaaaaggaagaaaggaaacaagtaccttgactgaggaggacccactgacagatgttatggagaacctacatgatccattttgaagtgcctggatgttatcatatgtgcattcagaaagatggagctgcttactgagcaggcaatgcctctttaagcttagaatctaagcacatccactttgaattcttcacttcagagaaattatagaactcaaacacaagcggcttcttaataacatgaacactagaaaacttgaatccaatagatgtacatggaaattgcaagtcaacatacttccctcggtaagcaggttgatgaaataccctaaggacaaaaaagaaaaaa

SEQ ID NO: 5059 - DNA, 826 bp, Glycine max
ccgctacgccgggcgcaaggcggtgatcgtgaggaccttcgacgagggaaccagggagcgcccctacggccactgcctcgtcgccggaatcaagaagtacccaagcaaggtcatcaagaaggactccgccaagaagacggccaagaaatctagggttaaggcgttcgtgaagctcgtgaactaccagcacctcatgcccacgcgttacacgttcgacgtggatctcaaggatgctgttacccctgatgttctcggcaccaaggacaagaaggtcactgctctcaaggagaccaagaagcggttggaggagaggttcaagaccggcaagaataggtggttctttaccaaactcagattctgatctcgcaatcgtgaggttttattattagggcttttggaatgttgccttttttttaatattgtattcttgttttgcaaatcttatcaaaactattattctgctcttaagatttgtcgtcgtcgtcttcttcttttgttaattaatacatttgccttcttttaatttacgggggaaatgaatgcgagcatgttttgatactgaggaattcgcacaaatgggtctattcagataggaaattttctggttcgtttgacatgcactgtttgaatctaggttttaattgcgattttagccctaatattttgttaagtttctgcattcacaattttcagaatgattatggctaaagttcactgaaacttattattatagtgaatcaacaaattcaattcatatgctcatgatgctgcacgtgatgtagacacagaattcccctttttcttatctatctaaaaaccgtgcagt

SEQ ID NO: 5060 - DNA, 763 bp, Glycine max
agaattctgagctcctacagcactgtcatgcttcatgcaactttcacttaaatcattacatgaggaattaaatattcaagagagaaactctataactagtaatcatggcagtaacagtatgcatttatccagtctcctgccataagaatgaaagaaaaaataaacaaaaatcagatataagtaaggaattaaatcccaaaccttaaggattacaccagctccaaaccatacatcgcctgccacttttagactgtcaagctcaacaatactggggattgacttgaaccggctcaagaagttgctaacctgcgaaggagactgggaaagtcaaactcatattcaccgcctaacacaaagttaatagtaatatagctcttaaccttcttaaattctggccccaattcaatggaaggattttcaggatttgccctagcttggttcctaataaccaatccatcttgtaaagtgtaaaggtccgactgcaaaacaaacaactgattgtgttaacaaaagacaagtatatcaacttccaaaaaagttctcatggcttgaaacagaaaagcttataacctggacaagaagcaagtctgaagttgccttcacgggaaggaagcgagatcgaggcacattaattccaatagctttgtcaaagaactgttaaaagatactagtattatgttaaaagctctagaacagaagtttcagcattgactacttataagtaatatcttaataaacattcagtacccttattgctgcacca

SEQ ID NO: 5061 - DNA, 811 bp, Glycine max
agtagattcaatcacattacagactaataacattctcaaggccacgaatcaacatatgcttcccttgcatccctctaaacagatggctgctattatccttcatggagaaatacacataaaagccctccagaataggcactaataatcaatgatattcatcttcaaaaagggtaacccattcctccatggtttctcacagctatactgtatgtcatattgtgaccacttatttcaagtaatgctcaagtagccaatcaatgagtgcaacatattgttctcatgattacacgcaatcatggcagatttcaaggataatagaaaaatgaaaaaatcaagatcacaaagcaacaaattgattttcaatcaaatttacactattctcattctttatcttctgaggtttatttcttgaaaaatagtcaaatgcaatgtacattacgaaaccatgaaaaggcccttttcatatgttcctctcacaaattcaacatcatcttgcatcaaacggtaagcttggtccattatttgataggagatttcatcaaaatcaaaggaaatctctcttaacttttgaccccatattaatgccttctctggcatcccctgcttgcaaaaatgagacaacaacatattggttgtaatcacatttggaagaaaacccatcttaagtaattttgcagtaaaaatcatagcatgatctaatatatcactacaaataccactcaacatagtgttgtatgtcactgtgtctggaacaataccagcagagatgagctgatccaaaatgataactgctttattcatttttcgcatt

SEQ ID NO: 5062 - DNA, 682 bp, Glycine max
gtttgggcatttgaaagtacatttgctaataaaaaatattgcattactgtaaatccatgttcatgtgagtttctaagttccaatgatctggttactagttttgcggtggctgattcaggcactctaagccataggcaacaagagtttggccttgcgaatgatctgtgtagtagttatcctgcatatatcttggccacaggctcctctgatggcatcttgaaactctggaaaagtaaacctggcaactcattgacccagcacttgccatgggagcttgtgggtttgtttgttgcacatgatggtcccatcaaggatatatgtttagctgattgtggtgagaagattgccacattctgctacgaaagcaattcaaatgctatcaataccatccatatatgggatgctgtaccactaatcagtgctgggacttttattttggaggataaaataaagactgaaagtgatgttattgctctaaagtggttacctttaggaactggggagttattgcttggagtttgtttgcaaaatgaattacatgtgtatgctcctaagcgttgtgttggtacaacattgtcaaactctgtaaattttccaaaaaagaatatatgggttcgcattgcatatgctcacacttccattccaatttatgatttcttgtggggacccagagctgcaggca

SEQ ID NO: 5063 - DNA, 722 bp, Glycine max
ctgtgcactgcttgctggtaatttacaaaattgcttttaaaaatgatattttctgatcaaaagagtacgcaacggcgttgcatattgttcattctttccttttagttgataacaaaaatgtataaggcagctcttatttacttatttatttatttatttatattagaataagctgtacggttcatgcaggtgtaccagaggaaatcataaaaagagcagcagctgtgttggatgccatttcaaataataaccatgttgagcggttatgcaatgagaacgtctctgctcaagatcgtcaatacaaggtgtcatcaattttcaagattcaaattatggctttggagatattgtttactctccgagacatgttaatttatatttctgaatggaatgcaggatgccatggagaaattgttggaatttgatattgacaaaggcgacttaaaacttttctttgaggatgtattttctctagttcttaatgcttcgtgactgaactgaagtcttctgttggtggttttcgtaggcattattgagacgccatttgtgatcatatgacatttgtttcaagatgagttgcatacctatcgaattctattgtattgagcaatccttttatggagaactaattgaaaaagagacacttcatgcctctatctttattacacgtgactgcaattacatcttgatgatagtgataacagcttttgctaggaaaactg

SEQ ID NO: 5064 - DNA, 768 bp, Glycine max
aatgcatttaatactacgatgatcaaggagttctgaaatttaaagaaaaatcttatttgattcagattcctccattgttcaaattgtggtggaatgtacaaacgttcaaatacactcatagccacagaaaatcatgtattgaatgctacttaccctaacacaacatctctaatctctctgcctcaaccacattggaacaaacatgtatatgaaccggaaattatttaagatcaaaatgtgcgttatcttgtgttgtactcgtgtactgcattgtagttgttgccacttaggtttgtcattccactaaggcactaattgtaggtctgataaattggttttaagcctctttttcttaacattccattctggtagacgtccactaattgccagggtgtcaccattatcctctcatttttgggagccattgttttctttttcagacatacaagtatggttagcttttacacattttttttcttttgctatctatgcttaggaaaaactttgcgtacacatgtacaattgtgcatcggactaatcagaattggcaattaatttaacactttttagttatcccaatgctgtatttgtcaaagtagtttctttttatggtcattaatgggcacattttctcaaatctttattgtagctgatcactttgtgtaccaattttgcttttgtgcagattgatagttatgtaaaaatatttcctaacgtctcacacggttggacagtgaggtacgaccctaaagatccaaaagctgtaga

SEQ ID NO: 5065 - DNA, 843 bp, Glycine max
aacattcatgtcataatagaactgaatgtagaaaactatagagaatttaactcgtatcagtttcaattactccatagtcttaccaatggtaaagattacacaaaattaacttgctgaataatgcagataactccagaaattacagaataatcttctaacaacgactatctcactaagtcaaacttaaaaaaaaaaaaaaacataaaacaaacaattgaaccttcatcagacactaaacttgcatagatgagaaacaccaaacaaccatagtagtgcattaaaactgaagatgcaactgtttcatcaacgcggaaaataacgttttagaagaaactataataaaatccacaaaacaaaaaattgaagacaaatataaaaaaaaaaaaaaatgaacttacggttctcctctagaagacaccataggccgtttgagttgtgaactcatgtaaacatcatcccttgtcctcttcattcctaacaataacaacaaaaaacagaaattaaaaatcagtaaacaaaaacaataaaaaacacgttcttttcaaactcagacacaattgaaaatccaagaaacccaactttcacattcgaacaaaagcaacaagcaggaagcagatctaaccgcagggaattcacaaaggcatgaaacgcgagcaagatttccagccccaaaatagcacacagatcaccctcgaagagccaaatcctaacaaaaagaatcaagaaagcaaaatttgcattacttcaatgaaaagcaacgtgacgataattcgcagcacaaagaaagggttcaaacagaaaaaaaaattacagagtgattgtgaagtgcgggagctgcaggca

SEQ ID NO: 5066 - DNA, 652 bp, Glycine max
attcagccctcttgttcagataatggcagcaatgattgatatccctgtcttgcatgagcagctccatctgggaaggtaaattcttctacctttatgcacagttgcaccctcacaatagtgcaccaatgccccacattaattatagtggctacttagtcctcaattcttctgtagtaactaaagttatatattactagctacttaaatataacaatcagccacctctctctaaagcctgattttcgatatattaagtttaattttaacaatatttttttactttcaatcaattaaaaatgattttagatataattttttaaaataattattataaaagttatggatcagatcatctcatatatagtagtaattcatgattgaataaaagtataaaaaaatatttaattattttaattaaatttataactaaataattatgaagaaaaataggagttaagaaggaaaaaaaaaaaactctttacctgatttattcttcgttgacttggttgtttagtgtgatgggttccatcttggtgattattggattgtacattcttctatggggtaagagcatggaaatgcagaatcgtgtggtcaagttagtccaagaagctgaagataccaaggaacaagagccgcaaccgcaaataca

SEQ ID NO: 5067 - DNA, 644 bp, Glycine max
atctacatatagcaattaacacctaacttcctaactgacccatataaccacttagtaattgacttgtgaattagttgggtttgtcatctagaatacactttagttataggccctttattcttatgaattgccctccgtcccccccacccccacccacacacacagaaaaaaaattgtccttgtcttcatggtaggcctggtgtagattatgctgcctcccagctatcttcacaagggcggaggttctgcctgagatccaacatatttgctggttcaacctggaactccatgtcatcagctaaggccaggggaaaagttggaacaaactgtggtgtgctgactgccttcttgaagaggcacaaacaatgacacggaagctggttgaatcctgctatcctcctgtaaatcaagctcataggccacctaatctattctttccaaaacctgaaaagggccataaaaagaggactgagcttttgattaggttttctagctagagagcacatcttactgggctgcaaattgagaaaacctgatctcccacagcatactccacacatctcctatactttttagcttgctttctcattctgtcccgggccttcaacaaattctgccttaaatcatctaacagctcatcccat

SEQ ID NO: 5068 - DNA, 758 bp, Glycine max
tcttgcataattggacttcagtatggtcacgttcttgcccatctacaggtgagatcatgtatcaagtttccaaacctcgatgcctgtaaaattttaacattttcaagatacaagttctttaaatcctaactctatggtctaatagtgcacttccctttgtagattattttggcactgaataatctgccacgcatgtactttaaattgtggctttaaatttctttgttggttatttggtagagctaagtcaactgacctttttcttttctgtatgcttgtcctgtaggaccacaaagggcgcctatacaactggatgtgtttttccctttcatttttggctcttggactgtttctggcattaataggtttgagctgtaaaccatctgttggctttttcagtttgtgaagagcctactagaagttattattggaaaatacctaagtcccacatcggctgccccaattcttggagtgcagcttatatatctgttggacaactttacttaatgtcaattggttttaagatgaaatctaacagttatttactaataataaattgagcattctctcttcataatcatatgactgtttagtttttcagcaaattaacttctttctatgttgattgatgccattgaaaagtttatattgacttctttttttccttcctttttgccgtttgttttcaggaattcctctaaataaatcgctgtacacagtcagttatatgctactaacttctgcaggcatgcaagcta

SEQ ID NO: 5069 - DNA, 652 bp, Glycine max
aacaatgagcgagcacaactacaccattatgtacttttccatggtaaaacaaaaaattaagggacctctaagtagctaaaacaatacagatgatatatgaaggcaacaaaagcatactattaagtccaaatcatattttggtcaacatcaagtgaaatgacagtgagtgatctaacacttctcttttgatatttgaagatcatgctttttatgcacattttttttccatcaactattttagcctatgtagataacatgatattggcttcttcaaatatattaaagaaggaaaacaaatttttaacagacccatcattataaattgcattgaaaagctaaaagaatcattcatcagatatccttaattataattccatacttcttataaatacagaatagaattacttaccctggaatggtgcacaaattgcaacccaattcttaacatatttctcaaaaatctgaaaaaagacatgtttcagcagtagataaattccaagattgaagtgtataaaccataaattgaaactacaaaataaaataaaactgatataagaagcttaacagatgtgttacatcgctttgcaggcacatgaaacatttcaccaaaagaccacccatagaatgagttataatatttatcttcttccct

SEQ ID NO: 5070 - DNA, 728 bp, Glycine max
agcttgcagtgtaaggaagcagaaagaagatgagttacctgaatcaacttgctattattgattaattgtgagagaagttgatacaagagtttatatactatagctcaactaatcaactcactcacaacaaacataactaactctaactaacttggtatagctaactaacccgagtttagtaactctaattagctaaactatactaagttaagttgggtaataagtttgttaatttttattactagaagaaacaaacctgtgacattttcttcttctttttttttttttaaccatcaaccagtatctcctagttctgctaacgtacatgggtttttacaatttgtggtaacaagattcaagaggatcaaacttcaaaccattttagtcgtgtaatcttttatatacttcaacacactttcctgatacctctgcctatttcaagacatttgatcctataaatctgactgatagggccatgatattgccttttgtggcaaacataggaatggactgtttatttgcggtgctaaaattgaacaagtatatatattgaaacttttttgaaactgatgtgcatacctaataataataataataataaaagcaatttgactccacaataagatgattttggccttaatttaacagtatttcgcttgtatgacatcctttttattttccttctttttatccagttgtttttgataatcatactgcaggcgtacagc

SEQ ID NO: 5071 - DNA, 883 bp, Glycine max
  misc_feature (874)..(874): n is a, c, g, or t
cccccctcccggggtcctctcaatcgacctgcagccatcagtcttgagaggaattcataatagagttgattggcattgtatgaggtgcttgagtttaagtggtggaaagcctttgcctccaaaatatggtcgtgtgatgagatcctcaaacacaccaccaaaattgccttctaatacaggtggcgttctaccttgttctgagaagaaagtagagaacatagatccaaaggtcatcccacagacgttagcaacaaatgggagctctgttcaaactgtttccggtggccatcacaatgttgagttgccatccgaatcaaagataccagataccaaagatatgcaagggactggcatttcatccaccattgaagctattgataagaagcctgatccaaagaactctatgaaatctcttagtgcagcttatagtccttccccttgcttgctaggtgaaaattctgctcaacaaataaattctaaggttttgactggtagagagacttcggaatctgagtctcttcctaaattatctgagctagctaagtgtgaaaatttgcaatcatcacaagattttcaagttgaacatacaatgtcacaagacaatgctgaagtatcatcagataaacatgttgacagtaatatgatgaataaccaacagaaggaatctcatggagaagaaaatttagtttatgatataaagcgtgatgaccaagatgctgcacttgaaaattctgttggaacttctggaactaatactgatggtagacagcactctgcattatcttcagatagttcacatgctgtagaatggattggtgatgtagtacaacttgtagatgagaaaaagtattaccattcttgctgtgttggaggnagtaacata

SEQ ID NO: 5072 - DNA, 775 bp, Glycine max
gtagtacctgaatgttgtaaaacataagaaaatttagattgtagacaaacaaccgatttaagcaggaaagtaatatttccacttattacctgtgcttcatgttggaaacgcagcaattggtacatctctggaaatctcaaatcatagcaaacactgaggcccaaacgcccaacaggactgtctactgcaacaatatccttgcctgaaaacatcaccaaaacagaagaatttcacatgaaaacaccatccttcatggttcatatcatatccaagtgtgcttatcttctctttcaaacactcctcctccccttttccctcagattttctagaaaggaagttacactgaggactaaagcaagactaaaggttcatctagtcttaacactacatagagagtaaatatccaacctgattctgtaaaactactttctttgtatacccttccacccggaacatctacatcaaaccttgaaataatataaaatgaataaaatatcaattgtttatacatccataataacacaacaaacaaacaaaaaagcagtaaaatctcaattcaggaggaccataccaaaaggatttgataaacaatcatttactacaatattaataattgttaggattataagttagtgatcttacttacaggtgtatcttactataagagcttataatttttccggtgtcatctacgataacatgagtattagacaagcgttgaggatcggatcctttttcttggaagcctccaagtgacaaccaaatgctggattct

SEQ ID NO: 5073 - DNA, 880 bp, Glycine max
gcgggggatccaataccatcgaccatgcagcctcctcaacagtttcatcattctcccaacctccctttaatagcaaagcaaaatcaattaaatcagaaaatgagatctcaaatcagaagccactcaaaaaagaatttacagctgatgtcaatgacattaattaagaaaaacaaatccttccttgctatgaagttgcagacaattttactgtgaatcagtaaaatctttttcaacagcatattgatcaatttaataaaggtgtctcattgatatcttcaatataggttgttacaacaaatttacaataagtgacaagaattattcaagagcctaaaacttggcctttaagtgtgcaatataaggcacctgatttcttgtattgtttaaattaggacagaaatttctgaatcttattcgcttggtatatctctcaaattagtggagtcaccaatgaaatgtctctgaacattgaagttctcttaaagatatgtctgatgcctaaaggttgaaagcagggtgggttctcctgaaaacatgcaaactggttatgacagctacctacatgccacccacacattcacaaggtgaacttaaaccatttatgcacatgacaagaactgtctgtattgcattaaatatgtgaaacagcaagatattagtccaaagtatattccatatagatatttgaacaaaacattagtttactatgagaaaacaattctagtttaaatatccttttttttttatcattaggctcaaatcgaccagcgtcatgccatgaatatcaaaattgagttgctccagcctaataactaaatgggctacggttccctcctaatttttgggttcattcctcatcactccagccgggcttttcttt

SEQ ID NO: 5074 - DNA, 792 bp, Glycine max
cacccacaaatagcaatgaagcttatcctttgaaagaacaaaatgtgtctgaaggattaccaaaagccttgaaaagtaatgaaaagtataggtccaaagaagctgttacaaaattgtctgaacgaatagaagcatgtttctggtgcttccgtggtatcaatttgaagattggcacttctaagtttgtcataactagtgggaagatcatgcttggttgtttaatattgttcatctattatgttttcagaaagaagcaagctactttaaaaaggtactcacttaagttcatagctccatagtagaatgtatctcaagtatttgtttctgtatcctcttaacttcgaggatacaatcaccattgcatatcaaagtcatctttagtttaaattaaccatttttgttttttcctttctggttgttgttcttgttggaaactatctcttatttagggaaattgaatctctaatttgggcaatatatgaccttatatactttaggatctgcattatgctgatttgtatagctgtatttctttatttccttatatactttaattccactagcaatttgatagactcctgatccaaaagaaccgttttattcatataaaagagatttactggcagagtgatctgctatcctcctttatgagaccctagcttcaaacaaaaaatcagatttgctcaagccaattttgtgtgcagctaaaattgggcaagatctcaaccattgattggtcattgcacagtaactgataaagagagagaataagatgaatgtttcagattttgg

SEQ ID NO: 5075 - DNA, 705 bp, Glycine max
gcctgcagctgtgcagcttctggctgctggactggatggccatgctgatcaagcaaagcgggtggaagagttatttgagaaaatttggccaccacctaatgtatgattcgacttctttatgtcgcacgagagtcttttgcctgatggatcaataaacataacacacaacagatgaagggaatattccattgtttttctttccctcttaaccttgaattcttgaacaatttagcacgcggttcctaaatgcacattttgttctttttcttttctttcttttgttgcaattgcatttgtctacttcttatactgtgactctcgtctatctttggtgtaccatactatcattcactaaaattcccggagcttatattttgttttaatttaaattaaaacccgaatactgcataattcggaatgtaaaatcacatttcacctaagctttttctgaatgtaaaaaatttactatggaggtgcaagaagcaactgccaaaattattttattacgaatcaaagtttgtaccattaaaatgatttttccaattagattttattaggatttgaattgatttagaagttaaaccctaaggatggaactcattaaatattggtagaggtggaaatggactgagttaaaacctattgaaaagtttgctttatagtaagatttatttaaaaaaattcactaaattgataaaaaaaaat

SEQ ID NO: 5076 - DNA, 839 bp, Glycine max
ttggttcgttttctgagggagcaccgctcagagtgggctgatttcaatgttgatgcttattctgctgcatcactgaaagccggcacctatgcctatccagggatgaggcctacaagatttactggcagtcaaataattatgcctcttggtcatacaattgaacatgaagaggtaggtttgcattcccttaaaaattggatgaaggatgcatatttgctttgggccaagatttgtttgacatatgatatatttacatattattcagtagagtatgtcagcaatttatggtctgatctttttggacatttgtaattgtaagcaacattactgataaaattgtattttcactacagatgctggaagttattaggcttgaaggtcactctcttgctcaagaagatgcttttgtttctagggacattcatctcttacaggtgatgcctctggcttgttaagaagctgtattaaattctttttttgcataagttgtgtcacatcaagtgtgaatttgtcatcttcagtacaaaattatttttcatcaaagatgtgaatggtttttagtatatcttgcagtatttcagattttgaataataccataaaaagatacctcaatctttagattacgatttctatgttacaacttcaatttagttttaaagtgctacttgaaacctttgccttataattatgctcattcctgtcaacgcattgttgcctgccttcttggcattcgtttgtttatggttcttttctatgcatttaaatgatgcatgaacgaatataattaatataggtaggtaggttctaaggtgctcttttgtgttttgtgttatctttt

SEQ ID NO: 5077 - DNA, 673 bp, Glycine max
agattttaaccataatttccatgatccaaactggcaatatttttcacaggcctagggaaaaacaagcccaagcagatcagaagagggcaaagtttttccagcctgaaggtgaccatcttacactacttgctatttatgaggcttggaaagctaagaatttttctgggccgtggtgttttgagaactttgttcaatcccgatcgttaagaagagcacaggatgtcaggaaacagcttctcaccatcatggataagtatgatatctatacattcttctaaatattttatttgctttggtttcagtcttttctttttgccgtgttctatgtttgtgtttttatgtttgatatatttattatgcacaaaattattgaggttcccaatgtttttacaaatgctcttgctttttagtataaaattcaatatatagtgaaaggtggagttctctttatgtaaagggataccctgagtattgactttgggcttcctgttgtcaagattctaaccaatatttttctgtggtttgtagttattattatgttcaccatagtctcatgcattattatttaattatattaaatttgattctaaattatctgtgtggatattcataattcaggtacaaattggaggttgtaagtgctggaaataacctcaccaaagtcaggaaggct

SEQ ID NO: 5078 - DNA, 784 bp, Glycine max
aaacagtatccatcttctcatcactgcattcctgatgccctgtgtcactgcccacattgtatccaatataactaatatctgcctcagccgaccaactggtgggtaaggagctgccaagagcagtccttaaaagttctgcctcatgaataacgtcattaaggatttctgaaacaccggaaattgtaccttccgaaatcacagactccgtggcctaaataccatatcaagcaggcaacccatgttaacacattttagctttcaaaattcaaaaactaaacaggataaggtttcttgttattccatgctagcagtagcagctgacgttaaacaatttctatttatgaccccaaagtatgcaatcccacataaggacccctcttcccccggtctctctcaaatataaaacaaaatagtattgatacctttaaaagagagagacgaagcctatgaattgatgaagttaaacgctccatgctttccatgctttcctttaaagttgcattttcaatcttcattctgataaacataagtgaactataagtaaacagaaggctgaaaagaaacaccatatatcatgggggtatcttcaaacagatcaaatacagctgacatggtttaaagtttaaactatcccacaaaccataaggggttaattgagcagagtaagacaggatctttcgttcgacaaatcaaagtttatggtaggacacaatgtaacagtacagagaatacactagagaaataggatgattgaaaaggtgtgtgatgtattatttgctaaaga

SEQ ID NO: 5079 - DNA, 874 bp, Glycine max
ttgcctgcacaaaaccactcctacaaaatgaaattccgggggatgagtatatactaaaaaacatgacaacaatgaaataccactttttgaacactcatttttacaagcacgtacaagttaaacaatactgtttacacccacctgtttaagcttgggtacagcttgtgatgggtttccctccagtgtcaccaatgtagataagaaaactccgatgaatatgggtgaaaataagaactgtgaaaatatttcatagcattcaaaattaaattattatacaagcacgaaattaataattgatacaaagtggtaatagacagtggattggaggaccaatgggaacatcccacctgatcaagtacaagccgtaaaagtgcacctgatgctccaggaagtgtaaccaatttactcagatacaaatacctatagattcaaagcaaatgtcaggaaagacaagggaatgagacttaataattattgagccttcatccaaactcctatgaccatgatatgtggaaaatctcctaaacatagacatcacaaatatcaaaaatcaatcttcattggattcttctgataatattcattaggggaatgaataaatatttacaatattattaaaaaaaaaaactacacccaggacctaacaacatattacacttattattactgccattgggatttgcattatttaaagtattatcatttatcacattcataattaatagactataaacaaagagtctactttcaggcataccaaaatagattctagggcattaccagaaatgcagtgttggacccactaaagcaaaaccaagaaaagtaaagacaaatgtcctcttgaaatccagtgacggcacttggtctatcacaa

SEQ ID NO: 5080 - DNA, 685 bp, Glycine max
tagcaaaacttgcaaatgctgctaaattcattgacaaactgccacaggttctggtgtctagtcattttctactatttcaaagttattttttatctgtgatcttgcaacttgataagtaacctcaaccttttaaccttctgcattcagggattggacacaatggttggtgagcatggaactcaactatcaggtggacagaagcagcgcattgccattgcaagagcaatcctgaaagatccaagaattctacttctagatgaagcaacaagtgcacttgatgctgagtcagaaagaatagtacaagaagctctagacaggatcatggtcaacagaactactgttattgttgcacatcgtctgagcacagtgagaaatgccgatatgatcgcggtaattcatagagggaaaatggttgagaaaggtacgaaacacgtatagccaagtcttgggttctttcattgagatgtcaaccgttgatcataatatgtgtattttacactttctcatgctaaaatcattgaccccaactttctgtctttctgaaactctattttttaatatattttattatcaccatgaaacaatttagtaactacttgagggaagcttaactataattatataagaaaaataaggcatcctttgttatcaagacggatcctagaacataaccaggctgcaggca

SEQ ID NO: 5081 - DNA, 766 bp, Glycine max
acttcttagccttttttagtccccttgccttttttttcaaaccaaattctttttttcgttaatttttctattaatgtgttttacaatttgccactattactttcatcatcaccttctcctctctacaaatacccagttattattaatttttctttgcacactcaaattaaatagatatatattaagaaaacaaagtcatcaggttattgagtacttattctgttgaggaaatatcttctgttttttcaatggttgttgattgcatagtggattctattgatgaacataattctacatagatacacacacatagagattggaaagagatgtgcatatctaaaatagttgttcagagttagctcagacaaacaatgatccatagcttagacagtgacatgaaaaataacctagctaccatcatcatctcctctcttcacgagagattaactaattaataattattttttctttttctattttttttttaccacaaagcaaatgatgcctttcaccgtctctgtgtctgtgccacctgttcactagcaaggttctgcatataattattagtcgtgtcccgagctaggacttttgcatttcttggctctccaaggtgcaaaaagtagccatcacgaaaccaagctaatacatatatagctaaggttttgttaacaaacaaacaaaccgagacatcagaatatcgtatctttgcttttccttctctttctcttttttcctccaacttggaatttttcttcaaaggcaatgt

SEQ ID NO: 5082 - DNA, 810 bp, Glycine max
taatgtggtgctcttatatgcctcaaaatataaggatattcatattgttgtcaatatatctggccggttcaatcttgcgagaggcatggaaggtcgtttggacaaaaattttatacaaaggatcaaacaagatggatatatagatgttaaaaataaaagaggtgagcaacaaaatgtgaataacctttctatttgtctatcattctgtggtttttaatcaacatgggcttggctaatttttttcatgcttctttgttcttttgttgccacaaacactttttagtttatgttaaaaatgaaggtgagagctattagatgtgtgactgctcttgtgaattgtgattctaaaaatctcgtttttgcattgaattgcatctcttcattaatgtgttgcattatgttccatggttatcacttatcagcctttctggtttccatatgatgttgcatcatagtggctaccaaaaagctactaaaaagtgtcgttggccagcacttgtattttaattgttgtcactttacttaaaacagtctaattcacatgttctttttcttatgatagggaagattatgtaccgtgttactgaagacagtttgatggaccgtctatctactataacccatcttgcctgcctattgattccccaaggttgcaggtacagtttgttattgtatttaataacaggcatcattgaaaattttgcaaaatcagttgcttcatgtttaactgttaccacttaccactgctagtcacttcatcaatgttgatacagtgtgttgacaattcatggatccatggatgaaattgta

SEQ ID NO: 5083 - DNA, 810 bp, Glycine max
tcatatccgcattgaacttgttgatgaacgcttccactcggcggttcaactcgtcctgactcagcgacggctccttcctcagcctcgtcgacgcgttcttctccctccccgcgaacgtctccgacttcttcatcaatttgccccctccgttcaagtcccgtaacggcgtctccctctcccacgtctccgccttcttcagatgccgcgttaacggcatcgctctcccctccgttatcgtcctccacgtgctctccaacgtctcctgcttcttcgccttcgccactcccaacgccaccaccttccctcctgctacaccataaccatacatcaattcatataacaatattttcttctcctctatttatatcattcttttttttttgttacatttcaaacactttgcggagttctaataaaatccaatgcattactgctgatacgattgcatcttcttctctatttatatctaatcacttcatttattacatctcgtactttataaatcaaaatttatatatacttttattagaattgaaatttcatcttactactattctacggaatcatttaatgaacttatgttttgttaaacatttattaaatcagtttcagttctccttttcttattctgattatttttcaatttcaaatttcaaaaaacaaatgaatgaatagataaataaatagtaatacagttgtagtgacgataccttcgggactggctctaacggatttccggtggctgaatctggcggaaaccggcggtttcaagttttcatttgcgaacgcgaagtccgaggagtctttcct

SEQ ID NO: 5084 - DNA, 759 bp, Glycine max
cctgcagacgaaagactcctcggacttcgcgttcgcagatgagaacgagaaaccgctggtttccgccagattcagccaccgcaaatccgttagagccagtcccgaaggtatcgtcactataacaaccgtattactatttctttattcatttgttttttttaaaaaaaaaagattgaaattgaaaaataatccgaataagaaaaggagaactgaaactgatttgagaaatgtttaacaaagcataagttcattaaatgatatatgttttaaaaaaaatgaaattgaaaaataatcagaataataaaagtttatataaatttagatttatacacaggcatgagatgtaataaatgatgtgattgaaataaatagagatgaaaatattgatattgatgagtggatgagaaatctgaaatggtgatgatgtaggggggaaggtggtggcgttgggagtggcgaaggcgaagaagcaggaaacgttggagaacacgtggaggacgataagggaggggagagcgatgcctttaacgcggcatctgaagaaggcggagacgtgggagacgacgcagcagcagcagcaggggacaccgttacgggacttgaacggcagcggagggccggtgatgaagaagtcggagacgttcgcggggagggagaagaacgcgtcggcgaggctactgaggaaggagccgtcgctgagtcaggacgagttgaaccgccgagtggaagcgttcatcaacaagttcaacgcggatatga

SEQ ID NO: 5085 - DNA, 759 bp, Glycine max
gaaggattaaaaggaaaaagaaactgtcttccccattgttctttctcaatagttaaatttgcttatttgttagtcttcatttaatgtactgatgcagtgctggacaacagagacattttataggaaaatcttcaaaatattgtgccatgaaagaacaagtagaagtattgttctccctctagggatgattgggttggtcaagttcaatggccttcacttcacctaagtgagctctaagaaaaagacccccaatttagacctacctatattgctgtcagttaatataatgtgtgaataactgcccaatgtgctagatgatgaagaatgaacagaacagtatgagagacagagagagaaggaagagaaaggaagggggaggagggcagtgtacagagaacagagataatgactcaattataatataccaagtatctcactcaaaaataacaaatgtaaaatagtcaaatagaaataacatatttggagactacaaataggaaccatcagaaccaatagtgtcatatcatgaatacctgtccttggatgcccatttgcattgcaactattgggtctaaaatcaccccccgaattgggcaacccataaggtaagctgaaatgtcataaggatggaccttgttagatgtaatatatatggcagcacaaagagatcggcaatcaattaatcaaacatgatccaaaatgtatatcccccatacgtgaccatcaaaatccattaaaataaacaacatatttaacctg

SEQ ID NO: 5086 - DNA, 731 bp, Glycine max
agaaatgctcttgtagttttttgtggaaggctttataaaatagaggattaatttaaaagatcatttacatataggaaatatgaaattatatgattgctatgcttgaggcattattagctaagttcttttgggcatgcaactctaaagagacttgtagacaattattgatatatttaactctgcctacacaaagattgtctaacatttaagcaagcctaatcaacagcttttgaatcttcatagaagaaaacatctcttgaaactgaactttcattgacctcaatgaaatgaagctgtagctgtccagaatcttgtgaagatggttccttttagttccatgttagctgttagtcagacagttgattttggttattctccggaaaattaatcctttatttttttgtgaagatcaaccctggtccataaatatatgttcttatgtgtttcccctacaaatagaacccgggattcataataaaatgaacaaatacaatcaaaatgatcaattatgagcattgacttttaggttgcaacaaattttaactgagaaaatatagttcatctttttctcattgttattgaagagctgagtcaatggataaatgacactgaaaataaatactattatctaatctgattaactagaaaaattgttcataatttatatcactgttattttattagtagtttggctggatattgtgtaagctttgctcattgagtgttaaaaa

SEQ ID NO: 5087 - DNA, 781 bp, Glycine max
gaagtggagccctcatttgtcggtaatgcgagggcaaaccaatccattgtatcacacacaagtcagctatctaccaaacacaaaccaactcatttcacacacccaagtgaagatgataaaccaaaaaaaaaataatgataaaaaagaagaagcatattagctagtacatagacgaatcatcaataaatgtaacataagtcttctcggaatccaaacacttctttattggttttagtttggtagaaccaagagaagggactttccttgagattttcttttcatcctcttatcatataattataataataataataataatagtaataataataatcattttccaaatctatggcctttccattatctctagatgacgttaaaatatagtaacaatgtgatatataataatattccgaaccaaattaaaaaaaaaaaaggaaaaaaagcgagccgagttaacgccaagcagatgcgaccgtgagtgttcttcccatccaaccaaagcaaatccctccgttctcttcttttacagtcagtcccgagttgactcggttgttggccgtggtgagtcgcgattttattgactcggccatgctttgactcagtggttttaactcgaaccccgccatgctcatacgcgcgcgccattttccaaacacttcacaccgttccacgcgatctcttccttcgcacgccaccgagttatgcaattttcgactcagtccctcctcgagtctgactcggtctaggttgttattgttattttctctccgtgcagtgc

SEQ ID NO: 5088 - DNA, 754 bp, Glycine max
atagtttccaatggtcttcacacctccagtgccaccaggagttgcacgatgtaattcattttccacaatcaaattgattggggccaaaccttcctgtggtgacattgacacttcgttattttttgaaggggtgaaagtatgtctaaaattgcaacagtaagagatacaaaaagaaacaagtatgacatgttatgttggaaataataattattaagattttccgttactaatacaagttgtaaaagtagaaaataaatcaagcaacatcagacaaatttcattcaggtcttgttaataaatcctacaaagaagaaaaaaagaggtaacaatctggacatctagaacactgctgcaagttttcttcatcttccttgtactacaaattcaacccattcagtcacatcagcaaaacccaataaaaattaaatttctattgaagttgcatcccaattctcataatatacaacaagtcccagactataagccatatttgagtaaatcgttcaaatttctcttacctatgggatttggatcaaaatttgttatttacatctgaaagaagataatgaaattgaaaaacttgtataaacaagagtaaagatgctatctttcaatgtagcaaaatagataactaaccttgaagtagttcccaacaggtgaaacgtatattagaaaggtgtactctggagcaggtgcaagaccaagtaccggtccacttcccattagcaaaggtctaatatacagggaaccttta

SEQ ID NO: 5089 - DNA, 631 bp, Glycine max
agaaggaaatccatattcatcaaatagccgcatcaaatcaccaaactgaccatgaagatcaccaaatactttgacaggagctttaagctgaagaacgattggttcatgcataaatatttgctcggcagcatagcaaagttcacccacttcataagaatccaagaagaaccgcctgtttgcaggagctttccagttgcgaggcctaagcaaagttgaaattatctggcaagaagacagtgataataagagattgtctaatgtagcaatatggtaattaagtgggtagacactaggcagtctatgtcaagagcaaacaatatgaacgaagcagaatgtcaatcaaataatgcttgcctttttatgtaaaccctgaggagatttctgcctggtgaactttttcgtaggatatggcaaatcattatttactggaatcatgcgtctgctttcattttcaaattgatctagcgataattgtctcaccattccacctaggttacctacagcctgcttggcaactacaacctgtaacaaaaatgtatgatttctgcatccttgagaggaacatgatcagttataaacaaggattccgagaacatacggctctaagatgaaggcggacatctccctcagg

SEQ ID NO: 5090 - DNA, 754 bp, Glycine max
cctagcagggagtcttctgcacctgtatatgtggtcagaggggtttttagttagaatttttgttatgagaaaaagctgaaatgacttaatgttaagtcaattgtttgcataagtgggtcgagacggaaaaattattatatagtttctaactatcacgtgtccattgttttgatgaatttctaagtgatacagaattaaattttgactaaataaataatatattctttgtttaattcattatctaactttttttatttaatatttttaaatttttatttttggtaatattattagtctcgattcttgacgtgacaaattaataaaatatcatattattatttaatagacttagattaacaataaatactaaaaattaaaattaaaaaatgtcagtagtaaaataaaataaaaaatatcttttaggtaataaactaaaaaaaataggatattatatatatatatatatatatatatatatatatatatatattatgaaaaatacttttaaaccttaaattcttttatttatgagaaagagttagaaataatattcaattaggtgtcatacgtaaattagttaggaccacgatggtctctcccataataatttttcaggttgatgggatgaaaatgcatgcatggtaatggtataagtttgtttaacacacctgaagttgctcatttagtcttctctgcacctctatttgcatcgcaggtcgatcctagaggagcccgggtacccgtcggaatcgta

SEQ ID NO: 5091 - DNA, 766 bp, Glycine max
atcataaaatgttcatcactataaagtattgagcaatttatttcatttatcaccaaaagaaataaaaagaaaaaatagttccattcagtaactaatgtgacatgttatcaaatcagcctccagattcatacaccttgaataatccaccatagaagaatgcagaagaaactattattagagagggtgcactgttcaaactctaatctcatgaaacgaatgagcagtaagaacaagaggttcacaatcacagaaccaaaaggaaatttaactttacagagcaactaaaactgaataatcacaaaaaatttaaatgatatatatcaagggctggattagaaatgtgttccttgatattgactagccaaaggtgtcaactttagcctatatcaattattattacttaaatgagttagatctatctagtatcatcaacttatgtacttctgaaaataaataaagcattgacaagcccagaaaagactttagtcttctattaatctgcaaatagtcattttgaaacatcaccaaaattgggtggggggagggaggggaaatgccaaagcaacaataaataaactacaatggtggctgccttggtgaaaatgcataccacacttcttgcagtggaaaaaattatctcgaccaccaaccctgtttccaaatatcatcactaagttagtttgaatgccaaaagtttatgcaacttaacagtgaacatgacatgacagaaggatatactgaaaacagcaaggcatgagctaacgca

SEQ ID NO: 5092 - DNA, 738 bp, Glycine max
tgcgttagctgatgaccatgctgtgtttgagtatatccatctgttatgtcatgttcacaattaagttgcctaaatttttagcatgcaaactaatttagtgatgaaatttggaaacagggttggtggtcgagataattttttccactgcaagaagtgcggtaggcattttcaccaaggcggccactattgtagcttatttattgtttctttggcatttcccccgccctataaaatgattgtatgcatattaatggcagactcaaagtttttttattttgagaagtacataagttgatgacatgatactagacagatctacctcattttggtataggctaaagtcgacaactttggctagtcaatatcaaggaacacattttaaatccatcccttgatatatactatcatttaaattttttagatttttcagttttaattgctctgtaaaattaaatttcattttggttcagtgattgtgaagcacatgttcttactgctcatccgctcatatgagattagagtttgaacatagtaccctctctaagaatagtttgtcctgcattcttctatggtggattattcgagacgtattaatctagaggctgatctgataacatgtcacattagttactgaatggatttctttttttatttcttttggtgacaactaacaaatgaaataaatcgttcaatactttttttgtgcaaggacttttatagtgatgaacattttgtgat

SEQ ID NO: 5093 - DNA, 761 bp, Glycine max
atcatataatacccgcacagttgcacctccagttcttccccaatgaccagatctcttgggttcaagaagggaacactgtcagcagaaagttaaagttagcaccctgttattactatggagggttattgaattaattgagcatcaaaagtgattggtgtattgtgtcctagatagttttcttaggttattcttcctccaacatatggagtgggattgttgtctcttggttatttattgggcaggtataaacatctttatactgtaatagagggaaaacatttttcccgtcatgaattgctggtaatagtgatgcattgatacttgatgattgattgcattgtcggccatagtggttttctataatttggttgatgttatttgatccttgtagtctgtctcgcacattgggataaactgtgattgttagttttgatcattctattctcaattacaaatgtagaaatagtcgtcttttgaggttaaattggccattccttacacagttgaatgaattgaaactcattattatttttaatgagttcctcttttttttattcttattattactcatttatacttctatttcataaaataaattgtttttttaacaatctacttttaagattttatagtttacaagcaggcaatttacgacagaagttgttgcaatatgggtagatcccatggctttaacagggataccgttcatagtttccctctagattagtttattaaaaatagtttgattcaatcataaaaat

SEQ ID NO: 5094 - DNA, 696 bp, Glycine max
acaaaataacacgaaaaaacacaccaccgcgaatggattcttacgttaaagtttcatgttgtcgtgtaagaattttatatttattgtttaacaaatatttcatagaaataatttagactaaataaaaaattatttctatgaaggattaaaaacattaacattgacatgtaattctaaattttaatatatatagtgagtttattaattttatcataaatactttataaattgtatcatgaatgattcttgactgattgatgataatatataaatttttttacaacaacaactgttaaattcatttaacagctatagaaaatatctaaatattttctggtaattttgacatgacagtttctgttaaatatttatatgaaaaacttcgttactcataatattttattctaaaagagttacctcatgtgaaagagaattgtaaaccggaaaagtagtcaagtaaagtatcaaaaaagtctgagaagagggaaaaaaagagaaaagagaaattttattaaatataacaaatctggggtttcgatgatttccatttatacacacaaaaccatccttgggttggagaagaaggaaacaacataaccgtccaaagcttctctctcttccatttcccacctataaaactagatggaaaaaatacacactgtgcttctcatgatgatagtgtagctgaagctcctt

SEQ ID NO: 5095 - DNA, 756 bp, Glycine max
tgttgttaaacatgagattctacctaggatctggagggggtgttgaaaacttgtaactcaggggtcataattgggatcctatgttcctacctccaaagaaaataacctctaaatcacaacattaaacaaacttaaattgataaattatagcaaagttataagatccaaatagtcaaatgctatacataacaaaacacacaattcataacacaacagctgtgagtgaacaatctaactcacaagggaacaatccgttgcactgaaatcatagaacaatccaaatcagaaatgagagaacaaattaaatcccaaagactgagcatgagactgtgagaagcagtagactagagagtgagaatgaccttcagtttacatgttgctacatccaaagggaggcacaatcgatggcacaagtggcagcatggagtggaggtctggtggttgtgaacaaaggagaggtccggcagtgcaggatgaaaagatttgcaaatgggtagggaacaaagaaagtcacaaatgggtaggaaagggcttcatgaatgagaagaaagggactctggaactgggtcatacagatccaacctggttttttcagcttgctctgccttgccgaggatcgactatctcacaattgcacgtggaagatctcaatcccactctgatcctacccaccggcgatccaggcacgattcagcttgcccgggtgtattcgactcataggatgtacgatcctatgaggtaaatcacaattgtaat

SEQ ID NO: 5096 - DNA, 823 bp, Glycine max
cttgtatgcctgcagctgttttgggtcgtttgccagggacaactgtttataggaatgttaaacagtatcctgaagcatatacatataatggaattgtaatcgttcgtgttgatgctccaatttattttgcaaacacaagttacataaaggacaggtaatgagaagtgagttgtaattgacatttttccaatcaagagcctgccttaattcatttagagttctcttatcaggttgcgtgaatatgaagttgatgttgattgttctaaaagacatggacctgaggttgaaagaatttattttgtgattctagagatggcacgtaagtcttgtgtgtcctgtgcacaaagaggcatatactatattgttcacgtgtttaactatttaagctaacatttcgttagcatgttgaaatttaattttaagagtaaatgaatgtgaatatataattatcgatgtgtactagtggcactaatggttaatatgactaataagtgattaatgatgtcttgagattattgaaatgtctaatgtctaatggtggttaactgtgtctaactggatcgggtggacgctgtgtgagatattttcagcaggggttgatcattttcattacttttaaattacctcatgctgaattacataaattatattgcactgaaaattgtgaaatgtgtttccactacagtttgttatagctaaacatgaaagggataatgagaaaattctactttttttaatatggggtagcattggaaactggaggcgatttaaagaacccggtccgagctgattgaatatggttactgttcctgggaatgtatcg

SEQ ID NO: 5097 - DNA, 741 bp, Glycine max
acgtcagaagtcagaattattatcattacccctttcatagtttagttatgaacaattgtagtggaaaacagcattcacaaacttcagtacaatgtggttcatgtaattcagcatctgaggtaacttaaaagtaatgaaaatgataaacacctgctgaaaatgtctcacacagcatccacacgatccagttatgacacagttaaccaccattagaaattaggcattttgatagtctcatgaatcaattgagtcatattgaccattagtgccactagtacacatcgataattatacattcacattcatttactctttaaataaaatttcaacatgttaagaaatatgttagcttaaatagttaaacacatgaacaatacagcatatgcctctttgtgcacagggcaagcaagacttacgtgccatctctagaatcacgaaataaattctttcaacctcaggtccacgtcttttagaacgatcaacatcaacttcatattcacgcaacctgataagagaactctaaatgaattaaggcacgctcttgattgggaaaatgtcaattacaactcacttctcattacctgtccttgatgtaacttgtgtttgcaaaataaattggagcatcaacacgaacgattacaattccattgtatgtatatgcttcaggatactgtttaacattcctataaacagttgtccctggcaaacgacccaaaacagctgcaggcaaacgagctccaa

SEQ ID NO: 5098 - DNA, 821 bp, Glycine max
aggaacccaacttgaacactttcttgagcaagcaaacacctgctcttgctgcatcaacattcattcattcattcataatctcactctctcattcacaatcacaactcaccactcataactactacttccaagccaagctgcaagattcaactttttccccttccacttctgcatgaactactttccaacttagacagtcagagatctaatggagtacgagaggatagagaaagttcaggtttggcatttagccgcactgctgccatctcttccattcaacctcatagttgttgtttttttcatcaaaactaaatctttattttgtttcttaaactgggttggtggaaaaatggtccatatgattcaaaggtttctgttcttggagttccgattacacttggtcactcccccttctgttttttattttttgtgggcttggtttcattgattccctccaagtgaatttttaacatggtttcaaaaatcatgcttttgctttttctacttttgtaatgaatggaaggatggggcttgccattattattttttgggtgggtgggtgaggaagagagggggaaaaaggctgaaaattgaaagaaaaaaaaaaaagaagggtagaattgatttgcgcttgtttttctcctgagtaaataaagggtgtgggttgaaacggtggggtgggccttttggtggaaaagaagaaagtggtcatttattgggtataattgtttatgaagtgtgctgcgatatggattcagttagaaatttgctaattgagttcttctagaattttgttgatgaggaaaagtatgccatttttt

SEQ ID NO: 5099 - DNA, 653 bp, Glycine max
aaaatgcagctaaaggtagagaaattattggtttgcttttactatgtaatccaatggaatatagacatagtgggtccttgagggaaaattgtacttgagtttaagaatattgaaaggaacatctttgtgagatcgatcgcttcaatcaaatcatggtagttaagagattgaagttatggtatccattatacaaagaagattgctttaaataaccaattgggaagaacctttgctttatccaggtagtttaattttatcctacgccagttcatttttcaaaaattttgagcttatagatgttacaagtcattgttaaaatcacatgttgcctctatctcatattatttattttttaaaataatacacacttctttaaaaaaaatattatttttctctcaaaaatttatttattttttgctgagttctctcaaaaaaatattaattacacaagttataacataaaaaatattaaattatcctcattaaaaaaagagctcaaatataggtttgaatttatttaaattagaatattattaaaaaaacagttaacacttttatctttgtcaataacaaataactggaaacaaaataaataaaattaagatgtgtaagaatgaggcacgagtagacaatatataaaaaattttctggtc

SEQ ID NO: 5100 - DNA, 753 bp, Glycine max
tagaagacgccacatcttcaactatctttggtttacttttgctacctagaacttagattaagtattatatatatatatgtatatggctctcagctagttggagtaagacagaatattggagactctgaactttgcagagaaaaacaaagggttgttggaagggccaacaatttgtacaaaaccttttaataatggtattttggtggtggtgttacctagtgcttgtgtttatcacaaaagatataatcatctagtatgacatgattgacggataattttataccttcaactaatagtaaaagatttaatttctaattctttatatgaaaaaatatttatctagagagattaatttttaaataaatattaattatcaagaaattaatctttaactctaagcgagatatccttaattcatccaaaaaaaaattatcacaaaggtttgttggtgcattgtagttttaaagagggcgactatatatgtagcagcatttctcttcccattaatcaaaggtggggtctattatgcccaacttgccgacaaagctgtctaattggacaaaaagtctcttgaggagtctttttactgtcaaactttgggtttacttaatggtgcatcagttacacataactgtttttacttaaacacaagaaggaattttaaggtatagcttttacactttacagttcatttggctacaattagaagggtccctaacactaccacacatgaagctttggacaaaaggttta

SEQ ID NO: 5101 - DNA, 720 bp, Glycine max
ctcgtgttttcactcttgttgtccaatcagaattgaagtttcaccttagtaatattattgaccttcaatgcaaatatttattatgtgaattaccaaagtgaaatactagttttgattgaagaaaaaaagttttaaattacagacgagattccctcgtaatcatattgcaggcaaatgtaaccataattgtgattgtgattctgtcgtaatcctcgatattgcatacaaatgtggttgcagagatccccaaaaccttgatattgtttaccaaaataggagacagactgtcaactgtggcacactaatcccaaataccctgaagttgcatctgaactcaaatgtgtcaacaattgtggtcgtggagatcccaaaagccttgacattgtagctgcaatggacagttaattgcagcacacaattgccaaaaaagttgcagccaaaaccgcagcagcaagctgtcaattacagtgcagaaacccccaaaagccttgatgtcgcaaccgaaatcagttacaaacagttttctaaaacttcatcaaaactacataaaaaactgcaactaacttttgccccagataaaatccaacacacatttgtccgaaatttcatgcaacatcgagaatcacgatgaaactgtgactgcaactacaagtgcaatttaaaaccttggcagtgcataaatcccaaaaaccttgatgttgggacaaatagtaggctgca

SEQ ID NO: 5102 - DNA, 787 bp, Glycine max
acacgctcatcatctggtatgtgttgtcgtgaatttggatcataaaaggacactcttcaacaaaataacattagcttttattagtaattaagcactaagcatggatggatacgttaataagattcttttttttaaagaaaaaatagtctttattcaaatttcatttatagttagtccttaaaatttatataaaaaaatgtttctaatcctcatcaaagaaaaaaagaaaaaagaaaatgaattttctgaaaattataaagaataaaaatgtataaaatttatgtctgataaaatttcaacatacttctatggactaaaaatgattacatagaaaatcacaaataagacaaatgaatatcaatggcatcacaattcactgctaggaaagcaggtaccttctttggttgagcctataatccattctttgaaacttttccttaatttccacctttgattttggtgatgtgaatgaagatgaagtgagagtaatccacaacatttataaagctgaacagcaaatgtacacaagcaagctaaaatgtgctttgcaagcagcctctagaggaggcaaaggatctttttttaatttccatttctctgatcaaccccatcatgacgcatgcacataaaccattatccttaacttgttagcacttatggatgcaaccttgttttctggctttcttttcaattctcaataaactataaaaaaacaacttttggtacatgattttttagtcttttagttatacattgcggatgatcagaacagaaccttcaccatact

SEQ ID NO: 5103 - DNA, 760 bp, Glycine max
gtctcagatgggtatggaattaagtgaaagaaacaggtttacctctttaaacatgtcagctactctgcctctgcaccaagacaacaatcccttgcactatgcatccaatctacctaacaaacacaatctcccaaatcagccatctgtgccctatcctccatacattgacaacccagaaacttctttcggtctggaaccccgaatccaaacggatatgaaacctcttcaacacaaaggaggatcttctgaggtacgctcatcaaccttgtagtatatcataatcataatcatatcacaaaaggtctttgttacattacatgtttcccttgttgaattgtaaagccaatacgaggggaagacattttgcagcaccagcaatcaagtggtatccattcagatgccaatacattaggtggttctcaaggtacacgtacaattcaatgtgattataaactaatctatatttccattactactatacaataatctcatgctccaatcttttcttccaaaccccagttgtcaaagaattcgaatcaggcacgagactatcattcccttttgacacgcaagcatgtgaacccaaagacaacagcaactcttcgcaaccatgcattggcggaagagatcattcaggagtgatcataagaaatagtgagaccaacattgttggtaggtaggtatatgatgcttatgtgaatgatatgtagctaggttcgtgcatgcaatgcaacatgtcttgaaaagcttttcaccagag

SEQ ID NO: 5104 - DNA, 597 bp, Glycine max
aaccacgcagatttactaaatttatgtgcttgatgctcccgaggatctctagttccctttcgaacacttgatcagacccttcacaacttcgatcaatctgcttaacagcaaatgtaccacagtcattcatcaccattcggtaaactgtaccaaatcctcctgatcctactagattctcttcatcaagagactccagcttctctatgatctcagatgatgtgtatggcagatcaccatggaaggtaataagttttgtgcctgctaaagattatattagcaatttatgaaaaagaggagattgtcttttcttttttccttctaataggagattgtcaaatttgaaacactactgttcttacttgcttttggatcagcttgtttcttgacttcagtgtatctctttgctgctcgttccttctttgataacaaacgagtccagaggaatgaaaggattatgacaagtgcgagacccaaaattgccattgctccaattagcacccccttcatgtaatgtgaaggccttttggtagggactgcatatattgaaatgttattatcttacatatgtcaaccatgattcttaatatgtatatcggg

SEQ ID NO: 5105 - DNA, 746 bp, Glycine max
agttaagaaagcatggagtttaacgtctaaaactggacatgaaataataacatacatctgagaatgaaccattattcttaagccaattcctagcaaaaaaatgttatgtccaacattaaaatgagtccaagtgaacttctgtagcccatgcatgggagacatgttggactcttagtagtagcttagcttagggtctaggcaatttacatgcaaaccaatttaagaaaggaaggagattgtgggggtcttggaggatcatagaggtccactaaggatgtgtgttcaaccattagttgatgaattacaaacacatttaagatgaagttctctatggagatgataaggaagtatcgacatacatagagtagcaagggcagctattgctgaagaagcaggcaaaaatacaagaagccaagccaagccaaaatggctaatacaagcaaagttagcaaataaggcccacagtcatttcttgtattgcttaaacattttattcttttatctttaccacaaatgccatgcctgagtaggtcatttaagttgcaaattgatgcaaaatagtcagaatttcagttccttgtattttcctcttcacttgtcactaacattaatccttctcttgtgttccctcaccttaagacattaataccacctaacattaaggatctctttctctttaaccagaaatatcccatgagacccctttaacgtgcaaatggcaaacccccaaacctaatctcgcaact

SEQ ID NO: 5106 - DNA, 781 bp, Glycine max
gcctgcagcacttacttcttcgcttttgcctttttttcttcaactgctctgtaaccgaaaaccaccctttgccagttttgaatcttttgtttctggttttggttacagtttttccgagccttgctattcattattgtccttcgaatcggattggtaatcagaaatttatatatatatatatatatatatatatatatatatatatatatatatatataaacttgcacttgctagcttgatttgaacttctttctttgtattattggttggttatgcttatgagtctttgattttgaaccctaatgtattgggttaagaattggaaatggataccgagtgtggattttgtctttggttttgcttgcaagtttttagttaccttcttggtaactcggttaattgtgaacattgtctgcataattaacatggtattcagatgtgattttaggagatgtcttcataaagctcaatatgaggaataatgccaaaaaaaataatttgaacattggataggttaaacaacccttttcctttatttgttgttttaattaaatttgatcatatctgaaatggattagtagtttattttggtgcttccattatattccaatccaaaatccttgtgtttgaccccaaaatcctattcttcgagctataattgatagatgttgctaaaacaatttgatatacaaatgaattgtctcatgcagacccttttagtggactcttctcataatccatagaatatgaaaattgaattacttgttatgctctctactcc

SEQ ID NO: 5107 - DNA, 805 bp, Glycine max
tccataagtcacaagagagagagagcattcttggagtcagattcacaaatgatagaataaaagcctttttcttgagccggtcgaaggccatggcagatccccaatagctcggcttaaaggactatattgaaaccacagcttcctaggaatccttctaaccattcattgaccacgatcatctttgaaaattccaccacatcttgaaagatctccatgttactagctctccaaatgaacttacacgtcacaacaaacttgatgccaactttagattctgcattgactttcaacgagctcctcgggttatcaatgattaagggattctgaaaatggaagtgaatcatattccaaatcctttgagctttgggacaatctctcaagacatgaaagatatcctcctactggtgaccacacttgatacaagaagagtcatgggacaaaaatatctgcacacgaaaaaagttagtagggagagaattatggcttgaaagccacaaaaactatttgatattttctgataaagctaacgtccaaacccacagtcttgcatcttgaaaattggggcaggcaagacgggctcgggtgatccacctataagcagacttgggtgagtagttttcgtcaaaagaaccatcccaaatgatagtatcaacaatgtcctcattcaagaagttactctcaatgaatagccttcacctcctcatagtcaaccttgtggcaaagagccccatgagtgctccaccggtcaaactacatagacccttttccttctcccaccctaaaccgaaagccaagctcaagaata

SEQ ID NO: 5108 - DNA, 706 bp, Glycine max
  misc_feature (516)..(516): n is a, c, g, or t
  misc_feature (607)..(607): n is a, c, g, or t
tgtcatgaaaaccataggatccctagagataacaggtgccaatgatgtcaaaaatgatcgaggagagacacgccctgattggcgatttccacttaaagtttgtcgtatctccaactccatggctgtttgtagtgtttgaggatcttcaaggagatgccggactatagctgacacaactgagtcatacccagggaaaaagcaagtccttggaagattaaaaagagcaaccagacttcctttttcaaggaactgtaaagctaaagcatgtgtttttgttaatcgagcacataattgcagaacagcctgcatgacaacagcaggaacatgctgttttatcagatcacatgcaatatccagcaatttacgactctcgtcaatagttgcaaaaccagtagattttcccagtatattctcaaaagccatagcaggttctttctcattcccatttgatttattttcctttggtaaaactgtatcaggaaattgctccccacaagaatcatgcaaggaaccagnccggggtccttccatattttcaacttgggactggactgcacccattgatccaatatatgtagtaaagcactaatgcctttgggacttgagntctttccccactctgcctaccttgaagttgcaccattctttatggagatctagcattctggcatatttcgggacttcatctaaaaagcaggcaaaattg

SEQ ID NO: 5109 - DNA, 750 bp, Glycine max
aacaaaataaatgagtttacttttaggctcgttagatcaagttaaacttttatgtaaattgagtcgagtctaaaaaaaagtgcgacacgtaataagtcaaactcaaatcttgcgtattcaattcaagtcgaatttaagtctagaaaaacttgacttaactcattttcacttttatggactcttttttgttagagaatattttcatccattaattaattgtacatttgtactggctaaatgtgagtttagcttagaggccttcggtgtgtggtgtctgtattgtaacactttatgatacttctggtatccttagtaatataattatattttaatgataaaaaaataggtaagaaaaatatatttaaattttaatttattttgaatcttattaaaaataggaagcctatgattttcaacatcatatgattcactgtacacatacggctggtatgaaatgaatgaatttgttagcacagtatttgtcgtattatttgatgtctgggtgtaaacacattgggacaataaatgctaaggtcagcttagattatttaattttcgttgatatgtagttactagttagcaagctaatattcggtggtgtttggtgtgaaactaactcaaagtatgtatttagggcatccacagttctgaaatgaattgcatcctttgacttttttttaattatcaaataataaatttatctttcaaaattagatttaatttattgatataccctacaattcattttga

SEQ ID NO: 5110 - DNA, 707 bp, Glycine max
agctcttgatcaacagccgaagaccaccttggcctctagaaacaagttaccaacattaggacagaactcaagaatatttaatagttagtcataaaatgaaaagaaaaatgtcattaaatcatttaccatagaacgatatgaggcacggttttgaagtaataactcattcatttcagaaattgttgttacttctggaagtggtatttgagaacctttagtctccttaggcacactgttgatagaagaattattgcctactatattgaattcatcttttgatggcttgaaccgctcttcctcggcgaaatcagtttcatcataatcatttgatgacattggagatgtaatatttgggctaacttctgttggacttagaggtggagctaaattagttggtattattgcatgagaaggggaactagaaatagtattgttgtaaatgctcagtccaaactttcctgtctgctcagttgcagaaccattatttgatatctcaatactttccacagtggaactttcattagtttcatcaaatcctaaagatctgcttgattcccttcccggttctgtgattaaaccagtgtttgaaacagtacccttttcctcagaagtcctagtttcattagcaatctcaaaggcattttcatcagtagaatttgctttgttaaaaaatgtcatgttgttggacgtttcagactcaaatggtg

SEQ ID NO: 5111 - DNA, 712 bp, Glycine max
acacctaccatgtaagtctgaaacgttcaacaacatgacatttttgaacgaagcaaattctactgatgaaattgcctttgagattgctaacgaaactaggacttctgaggaaaagggtactgtttcaaacactggtttaatcacagaaccgggaagggaatcaagcagatctttaggatttgatgaaactaatgaaagttccactgtggaaagtattgagatatcaaataatggttctgcaactgagcagacaggaaagtttggactgagcatttacaacaatactatttctagttccccttctcatgcaataataccaactaatttagctccacctctaagtccaacagaagttagcccaaatattacatctccaatgtcatcaaatgattatgatgaaactgatttcgccgaggaagagcggttcaagccatcaaaagatgaattcaatatagtaggcaataattcttctatcaacagtgtgcctaaggagactaaaggttctcaaataccacttccagaagtaacaacaatttctgaaatgaatgagttattacttcaaaaccgtgcctcatatcgttctatggtaaatgatttaatgacatttttcttttcattttatgactaactattaaatactcttgagttctgtcctaatgttggtaacttgtttctagaggccaaggtggtcttcggctgttgatcaagagct

SEQ ID NO: 5112 - DNA, 742 bp, Glycine max
tgaaccagggtattgtgagcattcatgctatagatgtgtagtttgctggaatcaaattcctcgagttattggtatgagatattttatgattaagaaatttgaagggttttagcttattgctttggatgttaaatataccgtttttagtttttcaatgatgaaaataagataattgatgattaataggttttactttttggagcatagtttatattttctatattagtgcatagtacttagtagcctaccacaacaatatgaggcttcaaatatggtgatttgcctgatcccacaatgaaatagaatgtaactttttattttttttaaaacatagctatagaaagtaacttttttttattgaagtatgaacaaaccattggttaacaatgcatatattattatcaactaaaagtgcacaaatttgtacgggaagtcagtgtcagccatgcttttgaggtaatgtaactactgagcccaaatgcaaattttgaggtaatgtacagtacacgccattatagtacaatgttaaatttgctaatactgtatttaattgcatacatatgtaaaagtatgtcgatgaaatcttttgtaccacttgtaccatccgcgccttgtatttgttgaccactcattgatgatttacctgcatttttaattattaggtgttttcagacctaaataatttgttcttttctttgtaggttggattataatcctatagtcaaggtgtcttgtatccctt

SEQ ID NO: 5113 - DNA, 822 bp, Glycine max
tgcctgcagttgtggcacaacacccattctacctgtttcagccaccatgcaagccacgaagttcaatggttcttgcaattctagtggtgaaatcttggtcagtgtatgtgagacccagagtttagtcacctttgctggcgcatcctcctccactcaagagctcgagtctggtggtttcggcagcagtgggttggctggtgtactcacaacctaatccttcttggctgtcacatcttccatccacctctgtcagaccaccatctcactaccagtgggagggatttctcttttactacccacactagaatcccatacttctaatgtgggactagtctcataccttgttggatcctaacatccgatcacactcaacatccttggcatgcacgcagacgagctgtgcacttgccctttgactagtctcaagtgaacactacaatgttggcatcaccatctttgttgctcattagcaattgagagacatgatgaagagctttgatactagctgatagaaatctgatattttattacaaataatggcgaagatcttctctgaaaaccaacaatttttgcaaagtttcttcacctcaatgccccaaaatccccaattctcattaatgacaagatgaccctctctctcacctccccctcttaatttgtatgcaaacataccttatttctccaaagttcaaactgtctcagcccacctaacctacctaactttctcactatcaaactaaaactaagagacacctaacagtttgtcttagatgggatgatcaatgaatgttgttatcacctcagtacaattttttgggtgca

SEQ ID NO: 5114 - DNA, 734 bp, Glycine max
tgccgcacagagtggacttcaggtgatcaaaccactacccaggcacctgtttaaggccataaagaacctcgttcaacttgcacaccaactgtttattagagtgttcaaaacccggaggctgaaccatataaactgtctcatccaaaacaccattcaagaatgcattattaacatccaattggaagagatcccagccattagtgagagcaagggtaagaataagtcgaatagtaataggcttcaccacaagagaaaaggtttcatgaaaatcaaaaccatgcacttggtgaaaaactttagcaaccaattgagccttgtatttattgatagaaccatcagcattctctttcactcgaaatacccatttgcaacctactgctttcctgtccgagggcaagggaacaatatcccacgtatgattcttcataagagcctgatattcttgttccatggcagcaagccaatttggggcagcaagagcatgctttactgattttggttctgaatgaaccaagaaaagagaaggatgaagtcaaggattgtgaaacctagacttagacctggtttgcatgggatggttatttactgttctagggggagaatcctcattacctaaaccagaactagaagagaaagatcctgttggtgcactagaagaagctggaacatcagaactaggctgatcagcattagtatcaaaattagaagagggagcaacactgtgggaagtggat

SEQ ID NO: 5115 - DNA, 753 bp, Glycine max
gttgcctgcagcagaagctatagaaccaatggcagactgcaaggacatccagaggacaatataaatttaaatagaaaaataacaaaccaatagctgatacattgcaattgtgacaatctttacaccatacaaaatcttccccataccatgcatgtttcctgcaagactcgggaactattttggagagctgtcaacagtcttcccatcaaaggatctaagaaaggaaggatgtcttcacccatgttctcgcaaaaagcagccaacgcatagtatgacttctcctgcatgaatataaatctaatgcttagacaacatgcagacaatctatttaatatttagttttggtagtagctctaaggtaatattctttttgtattgacaagcctttctcttctccagtgtgtacctttacttcatcagatacatcctcaagagcatttaaaatgcagggaagaacactctcataatgggatacaatttcaggctgtaagtgctcagcaaattgacccaaagcaaaggaagctgcccctctgaccatttgttctgggtccctcagagctcccaggacaatatggagaacaggttctagcttacttttcatgagttccaaacaaccttctgaaatgacacccaaagcagtaacagatgcttcccgaaacttcgggtttgcattttgacagcttacagaagcaaattcaaaaactggttggaaaacatgctttgggatgttcaaagccatggtatcaataactt

SEQ ID NO: 5116 - DNA, 682 bp, Glycine max
tgcctgcagcgcaaataggctccaaacacaatgcaaaaacttcaggcaattcaaactttacatgcaaaaaaatagtaccaaaacacttcaaattccactctattctttttcaaagggtttttcagtccaaactacccccttcagaagaaaaagaccacatatatatatatatacacacatatattaaaaatattgaatttctactttccaaaatatgaacagaagtttgtccagcctacacgacagagtgaagaacactgcaaatttaaagtccctcaagtcggtcaaaacgacccgaaaacgacataaaaacatcatcaaacgccgcaaacagaacatgaattaaaacgactaccaacgaagcaaaaaagcaaaaagaacgacaaaaacaaacgaaaaccgaaagcagcttgctcagacaattccacaaaaacccaccaacaaaacccaaaacactccaaaacccagaatcccaaaaccatcaaagcttccaccttcacaaaattcacaaaaaaaaaaacaaaaaacaaaaacctcaccttctaaggcttcttcacagagctgactctgaaaaatcttcaaaacgttaagaaagcctccgatattgaatcactctggagagagaaaaaggtgttagagagagaaagtgatggatgggtttgagacaaaaaattttgtttca

SEQ ID NO: 5117 - DNA, 787 bp, Glycine max
aattgtaattaccccccgccccctatactcattaggtgcatatacatctagtgagagtattgtttagatgcataaatattattgttgatataggggatttaccactactgtggatagcgcagcagattccatgccagcaaaattatcctctatcacgtgtttattatatatattgatccttatcaggctctcaaccgtgcgtgtatatatatgaatatttgtatgcacaagttgatactttagtccccactgactgcaactggtattaagaaatgcaaacaaaattaagaaaaaggaaaaaattaatgacctaatcacattaccggaaactaacaccaaggtttaaaagtcagcctcaaataccacttgcacgtgttaattcagacagctatagagtaggaaaatcagttgcacgaatactattctaaaacaaatgttaaaatcttatccattgaatttaaattgaagatttaaaaacaaaacctttgacagaaatcaaaggcatgggattacagcttagaattcgtactaatgagcattttcctaattcaaatgggaggggttgagggttgaaaacatttctatatttgaagctatacaataatttctcctagcatattttaattttctaataagataattcgggatctatataaactcctagaccttacactcttcctcatcctcatcttaaaaacacactacctgctaacaaagcatcttcagacacaatgaatgaccgtgtccgacatgctccagctgcaggcaactgcctgcagcccacccc

SEQ ID NO: 5118 - DNA, 755 bp, Glycine max
acacattaaatttccattttaaatctgtaagaattatagtcccatgccttgatgggaactgttgctattgtatttgttttctttcagttgtacataatgttttcttgttctgaacctgcattttgtataggcgtgggattagaaagaaatcatctgttcacaaaaccaaaaaggaggttgacaccactaggatgtcgggtagtcttcctcatgtcacatttcctgaagagtcaaatcaggtattgggagatttctgttttggcttaaggtctttgagtattcttgtatagacctgtttcacactatgtccacttcattttatttgtgttggcatgccagtgaaaatgcagaataaaaaggagatggagcatccccagcatcaaaacccattgttgatgaatcaacaaggatagagatttcccagacataagaattttttttagcatcaaaggatgaaggtttcactgactaagaatacccatggagtattttatgttgtttatctgtttcacatggaaatatgatatgggctacattttcttttttaaaaaatagtatgattcattggccttttcctgaaccgtcctggtgaattgggcatacattttggctttttgttaaatttgaatatttcataagggctaatagacattgaaaatcttcaaaggatgattatatagctgatatcagtttgtttggcatatgcagattgtatttgctatacacattcacagaatattaattttgtctgcact

SEQ ID NO: 5119 - DNA, 821 bp, Glycine max
ggatatcttctcatgaactatagtatatgctgctgagttacatttcggccctgctattaagcttatataggcgtctatatcagaataatgcaggttcattctttcatttgtcatgtgccttcattctcgtccatctatcataatgttgccttatgtttcgcttccttttgtaatggttctgtctgatggaattcgttccctttgttatctgcccttgctttacaattcaaagtaatcaaaggagaaaaatgtttggttgttttattaagcaatatatcatctttgatactgttcagttgcttcatgtgatcattgcttgtaattttttttcttaaagtaggacatgccaataaacattcaatgataaattgatgctatataaatctcacgagttacatccaaaaatcacaacataccagtaagctaaaacacgggccagtttgtgttaggattgacaatcctccaagatcaacatcaactctggaaattctgtattaacgattaacattttcttcccttataatggagggttattaggtaaacttaatcaaaatgttacaggggccaaatggggccatctgttgcagatggcaaggaagcagatgaccagaaagttgctaatggggaggagactggcaaggtcaagaaaaacaatcacgttgaaagcgacaatctgagcagcaaagaaaacgtgggtggttgttgccagggtgttaatggagtttcttgttgcagaagtgcaagtcttgagcaaaacaaggagattgaagaaacacctgaaacacataagaaggggagcaaaatctgttcgaattggcctc

SEQ ID NO: 5120 - DNA, 826 bp, Glycine max
agagcatgggatcttgatgataaattatgctactgggtgcatatttgagtataatgcaacacatcctgagggctctggcattggttttaaggaggaagcaagcccaatttcattggctctttctattccaaaactaaagctatggtaagtttcttacatgttatggattaattatatctgttcataatgaattattgaattatcataataatttttatgtgaacattgacaggttgaggagctcttgagagaatatgacaatgtatgcacactcagggtttgcatgccaatttcatctgacctgagcaacccgcgcaacttcataacaaagatttctcgttataacaaagtagtcaacattccaaacagtatgactattttggatgaacttctgcctatctcaattgagatggcaaagaggaacttgaggggaatctggaacttcacaaatccaggggttgtgagccacaatgagatccttgagatgtacagggattacattgaccccaacttcaagtggtctaacttcaccctcgaagagcaagcgaagttggttgttgctcctcgaagcaacaatgagataaacgcatcaaaattgaagacggaattcccagaattgctttccatcaaggaatcactcatcaaatatgtctttgagccaaacaagaaaacataagcagctttatgttatttagacaaggctgttatgtgttcaggctatatagattactcactcattatttcactattagctcctttcagttactgtgtgtagagtgtggctagtattacaattgggttaggtatgttccctaagtcttcaact

SEQ ID NO: 5121 - DNA, 809 bp, Glycine max
atagtaacaaagccatgcacttatttagttaatgcccacaaaataaaacaaaacaaaaaaagcagatgtgaggtatggcctacccaagaggaccaaatggtagccatataacatcccaacggaacttcggcaacctaccaaaaaaattattattatttaacagtaaaagatgagaagcacctacagatagcagaaaacaaaaccgaagagtgtgcatgaagcagttgtaaacatttgtttgttcctccttcccactactactgtgtacaagtttcttttattgtttatccgctttatttatttgggcccaatagtagagcctctagattgagtagctagaaaatccaaaccgaataccaatgtccagagttttataatatgtttcatttcactctatatttaccaatacgcagaatcctgtatggagcatataaaatgcttcaatcagtggttatcagcttatctagtaactgtacctcaacatgtaatatagccagaagattgccagaataacgccagtgtaccaggagtaatggatccatctcctgcgatgcatcgactcatgaagcaatcctatgatggcaaatgagcatgctaaaacagccacccagtctgttgaagttattcaattaaataagtttacagaaatggtcctcataatttgtgatatgtggataacaagcagataatgagggcaaagggtgcaaacagaatataaagggactaaaatcccacaactaatacaacaagaatgaaggaaaaagttcacaacataaaataggaagcagaatcctgacaaaagaagtgaa

SEQ ID NO: 5122 - DNA, 767 bp, Glycine max
ttctctctgtctccttttctcgcattactaccttctccttaccattttcacatacctttttattgctcccatttctctctctctctacatcctttcttgctgataaagcaactctttcttcttcagttccattccattcctcacaagagtctctgcattcttgatttcacaagaacataccctatttgcaagaacccatttttcacttttccagcttcgtatattcggattctcgggagtgaaaatgttcgatgcgcccaaattctattccaagtgggaataaaccttctctgtttccctcctttccttttttattttcttcttaaaataacaataatgatgatgaaattaaaatgtgaaacagcaaatcgcggttgaagttaacaaatgcaagaaaaggagcgcggtgcggagatttctcaagaaagacatggctgaccttcttgggagttcccttgattacaatgcatatggaagggtatttttttccttgctatctgtttcttcacgtgtctttcacaatatttggaaagaaatgtattaggttcttaattattcaaatttaattacagagaaatatctaatcttttattaggttcttaattattcttctctcctcatatttcaagatggtatcaaagcttattatcttccgatttaaacttgattttttaatttgtaatttgaatacgtatccctgttgctattttttttttctctttttggtttttgttctaagttatattgcattcttcaactgcaggcat

SEQ ID NO: 5123 - DNA, 785 bp, Glycine max
caacatactgaatgttgatttcatttttcaattcaaaaaacctgtcttcttgggtggtgagaaatagaaatttgcctttctcctttactccttttattattttgaatgaagtcttgcttcctactttgtacaatgcaatgctgctcacactttaatgcaagcgggaataaatttttcaagctatcctattttttttcctgcttgttaggtaacaaattttactatatttaatatgactactaatagttttttatttcttggattaggatacttcattttttttgtgtgtgtgtgtgtggatgtttaacttctttgtattacattaagctttcaataacagatatgatgtatggtcagttcatacgattcttctcttgcgttttttttcttatatccatgatacttactttttgtccatacgtgtggtatcatctcaatcaaataactactaccaactaaacgaaaacctgcacaccaaaattagtaggagaatcaaatgccatgtacgatattaaatttatgaaaagatatatagctctcgtaaagcaatataatatgtttttcattctctccatcttcgttaatctcacactaaacactttatcattaattttatttctcctttttgttgtgagatgacttaaatcatgaacctttttagtaaatttttggacagcatatttgattcatcatgatttggatttctttttcttttgataaatgatcttcagtccataagattttgatcaagtgatggagttacaatactatttaagctgcaggca

SEQ ID NO: 5124 - DNA, 808 bp, Glycine max
aagcttcaaagaaaggaactgcaaaagccagacgtgaattggtattaatattaacaaggctatgctaaaacttaaaaaagtatcttttcctgacaaaaaataagcactatcttcttctcttctttttgacttctgatcccttacctctacttgatgctgcaaggactgcacatagtttatgatttcatccaacattactgccatacccatggtctgcaaccattaatgaaaatcaaaatataagaatttggttccatgaagttagacttagacaaattggagattaaggaaacatgtctctaccttgtaacatcctggaacaatgttctgtaagcaccttaatttctcattgattttccctcttctaacctgatcaacaataaacgacatacaaatatgtattagtccacgttcatcacaatcaaagagacaagaaaaataaccaaagtgattgagtatattcatatcttattgttttatcttttatgtttgtgtaggatatttaacaatcttggcttgaagaaaggtgagttaggaaaaatatatacacacaccctttctgctaaactgtgactatcagtagcttgacctcttctggctctgacatgaaccacttcctttgctttctcctcttctgttacattgctttttactctcttccctcttccagaactctgaaattattcacagaaaaataaaaaatcaatttgtgtcttgcatgatacagaacatggtgcatggccaaaaataattggagaaaaaaatagtagaaggaatttacatgtttgatcttgcttccactttcaga

SEQ ID NO: 5125 - DNA, 742 bp, Glycine max
atgtttgtcctccttagaggatgcactgtcaaagagtctttccaaattgggagtgagattgcctctgctatcactgctatgaatcctagccctgtcaccctgaagatggagaaagtttatcacccatgtttcctccttactaagaaaagatatgtcggctacagttatgaaagccctgatcaaattgaacctgtttttgatgccaagggtattgagacagtacgcagggacacatgtggtgcagttgcaaagataatggagcagtctttgagactcttctttgagcatcagaatttattggaggtataaatgctagcagattgcatcttttctgtgtacatcacattgaaataaatagttgtttgaaaattgttagagagaaaatgagaaacatgtgatgaattctgtctcaattacacagcgaagcctattatatataataggtaacataaaatgcaaagactatagttaccctaagtccctaactatcttgattacatactaatatcgatccacacaattaccctatttacattaactctcttcaaattaaggcgtataaatgctatgcatctaacttgttacatatataattgatttgaggacctctcaatgacttagtgacaaagcaaagatagaaagaaacaacagaattccaactatttattctggatacttcatctgatctgaaaaattacaatattggtttcatctgaattcatgcttaatactttttatgtgc

SEQ ID NO: 5126 - DNA, 745 bp, Glycine max
gccatgcctcagactagggcatgtgatagatggatggcacacttgtagttgtagtgctaccaccagcaatatgacagacttagcattagcaagtagcaaccactatatgtactaactggaaacatgtaatatggcaagatgattagttatggctttgctgaattgcatactaaggatgatcctgctatgtcattatttagaacattacatacaaagcattatatttttaacaacttaaattgctatcaggaaacagcagcaaaatataaatttgtgagaaaatgagaaaggaaaattttctgaatgtgcttgagtgctttttccaccaagcagaatgggctttctttttattcaagggtattacaaaaataattaatgctaaaacaatttacaagagaacaattaaaataccactaattcctaagatgcatggaacctagctataccaagtatcttggctatttgaaaaaataaacattaaagaagctctcatctcataaaatattcctatctccaacaaaattattaaagaaaatgaacaagataaaacagtcacaaattacccattaaacactatatgtaaactacaaaatattaacctgcaaactttggatggttgaatcacgctgttgtatcagcaaattttgctcttgttctaactgtaacatatgagcaacttgatttctaagctgagcattttgttctttctctaccttataattatcggccagcaaaatatgctctg

SEQ ID NO: 5127 - DNA, 679 bp, Glycine max
gccatgcctcagactagggcatgtgatagatggatggcacacttgtagttgtagtgctaccaccagcaatatgacagacttaccattagcaagtagcaaccactatatgtactaactggaaacatgtaatatggcaagatgattagttatggctttgctgaattgcatactaaggatgatcctgctatgtcattatttagaacattacatacaaagcattatatttttaacaacttaaattgctatcaggaaacagcagcaaaatataaatttgtgagaaaatgagaaaggaaaattttctgaatgtgcttgagtgctttttccaccaagcagaatgggctttctttttattcaagggtattacaaaaataattaatgctaaaacaatttacaagagaacaattaaaataccactaattcctaagatgcatggaacctagctataccaagtatcttggctatttgaaaaaataaacattaaagaagctctcatctcataaaatattcctatctccaacaaaattattaaagaaaatgaacaagataaaacagtcacaaattacccattaaacactatatgtaaactacacaatattaacctgcaaactgtggatggttgaatcacgctgttgtatcagcaaattttgctcttgatctaactgtaacatatgagcaactt

SEQ ID NO: 5128 - DNA, 742 bp, Glycine max
agtttccccgctaagcataacacagtctgtgccatcaaggactgcattggcaacatcggtggcctcggctcgtgtaggccgaggagatttgatcatggactctaacatctgggtggctgtcaccacaggcttgcctttaatgtttgacttgtgtatcataactttctgagctagaaagatcttctcaattggaatttccattcccaggtcacctcttgccaccatgaatgcatctgaattttccagtatttcatcaaaatttgcaacaccctcttgattttcaacctaacaaagacaacaaataagtacaatttgggagattaatcaatgccagaactttgtttcttgttttcatagacttgtacggagagcttatacgtatgtttgaaaatagaatcatagtgaaagtaaaatgacatttctgtaaattatttgaagagttaaagtaaaacagaatacatttacttgagaataaggatggataccttggacatgagaagtatgctttttgcatgctttccaagtagatttctgacctccacaaggtctgaaccttttctaacaaaagagagagcaatgatatcaatcttattaggaaccccccactccaaaatgtcctccttgtccttctctgtcaaggttggaagatcaacaaccactccaggaaggttaacattcttcctctcccccagaactgccggtcgactttaaagggttccggggtcggagtgtcatgcgattc

SEQ ID NO: 5129 - DNA, 661 bp, Glycine max
ttggggagaggaagaatgttaccctacctggagtggttgttgatcttccaaccttacagaaaaggacaaggaggacattttggagtggggggtcctaataaaattgacatcattgctctcttttgttagaaatggttcagatcttgtggaagtcagaaatctactaggaaagcatgcaaaaagcatacttctcatgtccaaggtatccatccttattgtcaaatctccaaataaaaatatcaaacctttgtaagaaaggactttttcgttcaagaaaatgttttctgttttacttttattattctaattatttacagaaatgccatgttactttcactttgaacttatgtataagttccctatacaagtctatgaaaataagaaacagttcttgtattgattaacctcccaaattgtacttatttgttgtcttcttgttttggttaggttgaaaatcaagagggtgttgccaattttgatgaaatactggcaaattcagatgcattcatggtggcaagaggtgacctgggaatggaaattccaattgagaagatctttcttgctcagaaagttatgaaacacaagtcaaacatacaaggcaagcctgtggtgacagccacccaaatgttagaatccatgatcaaatctccccggtctacgc

SEQ ID NO: 5130 - DNA, 736 bp, Glycine max
agtttccccgctaagcataacacagtctgtgccatcaaggactgcattagcaacatcggtggcctcggctcgcgtaggccggggagatttgatcatggactctaacatctgggtggctgtcaccacaggcttgccttgcatgtttgacttgtgtatcattactttctgagcaagaaagatcttctcaattgaattttccattcccaggtcacctcttgccaccattaatgcatctgaatttgccagtatttcatcaaaattggcaacaccctcttgattttcaacctaaccaaaacaagaagacaacaaataagtacaatttgggaggttaatcaatacaagaactgtttcttattttcatagacttgtatagggaacttatacataagttcaaagtgaaagtaacatggcatttctgtaaataattagaataataaaagtaaaacagaaaacattttcttgaacgaaaaagtcctttctcacaaaggtttgatatttttatttggagatttgacaataaggatggataccttggacatgagaagtatgctttttgcatgctttcctagtagatttctgacttccacaagatctgaaccatttctaacaaaagagagcaatgatgtcaattttattaggaccccccactccaaaatgtcctcctgtccttttctgtaaggttggaagatcaacatccactccaggtagggtaacattcttcctctcccccagaact

SEQ ID NO: 5131 - DNA, 806 bp, Glycine max
aatgtgccctgaacttgtcaaatcaacagaactgtccaaatccggaggccttcattgaggtatttttttcttcaacttgtattctttgttattcaatctacaaatgcttagttaattaattccattggaagacttaggtcttgtttgaaatgattctctcttttctagaaaaaaagcttattttaacagctttaaaatttcttttcactatagtttttgaaaagaaaacaaaacacttgtttgttaaaaaaatgttgaaaatagttttaaaagaattgtgcatgagatattaacatctgtcaagtatgcattgtacgaggtcaaaaagatgctttgtttattatgagaatatcatcaaatttaaaaacaaataaaccaaaacaactctaagttgtttctgtagtcttgttttcagagctgcaattttgggaacaatgtagaaaacagttatccagacatgtttttctattcttttcattttaaaatttgaaagtagtttttgaaaactacaattgaagtatcaaacaagaccttactattatggttttgttctgtgatatcttggtcaaaacttatatgcacaagtgtattgatattatattctattattacagttttgaaagtaccaacctgacgctggtttttatttgactgcttaattttctaaagataaatgtattttattttcttctataagttcatatatggtctccaactatgtgtctcattgtctcctatttgttttctaacaggaggtggaagagtcatttactttttggggcaccccagaaggtgatattgttcct

SEQ ID NO: 5132 - DNA, 659 bp, Glycine max
ggcccattgctttgcttgtacagatgttattgatattgtgaacagtatcaatgtatttgtatgcagaagtttaacacaatctggtggtctgattctttttctactagatatgcaaggataaagatgaagctgaagtttggttcagtggtttgaaagcattaatttctcgaagccatcaccggaagtggagaacagagtcaagaagtgatggtattccatctgaggctaatagtcctcggacatacacaagaagaagttctcccttgaattctccctttggcagtaatgaaagcctgcaaaaggtataaacttattctttatgtccttctattttctccctttttctctccattgcagttgaatttgtttgttaagataatatttatttttcctattcaggactgtggggatcaccttcgccttcatagtccatacgagagcccccctaagaatggtttggataaagcattagatgtggttttgtatgctgtccctcagaagggtttcttccctccagattctgccagtgcttcagtacattctgtgtcatctggaggatcagacagtatgcatggtcacatgaagacaatgggtatggatgcttttagagttagtctatcaagtgctgttagcacatctagcccaggttctggtcatga

SEQ ID NO: 5133 - DNA, 803 bp, Glycine max
attccaaagctttgggaaatagagaatccatttttgcacccaaacaactcccaactcggtgattcccaccacccaaaacaccatcacctgtgccttccccccaaatgaaaacatcccctagagcatcaccatcatcatgaccagaaccttggctagatgtgctaacagcacttgatagactaactctaaaagcatccatacccattgtcttcatgtgaccatgcatactgtctgatcctccagatgacacagaatgtactgaagcactggcagaatctggagggaagaaacccttctgagggacagcatacaaaaccacatctaatgctttatccaaaccattcttaggggggctctcgtatggactatgaaggcgaaggtgatccccacagtcctgaataggaaaaataaatattatcttaacaaacaaattcaactgcaatggagagaaaaagggagaaaatagaaggacataaagaataagtttataccttttgcaggctttcattactgccaaagggagaattcaagggagaacttcttcttgtgtatgtccgaggactattagcctcagatggaataccatcacttcttgactctgttctccacttccggtgatggcttcgagaaattaatgctttcaaaccactgaaccaaacttcagcttcatctttatccttgcatatctagtagaaaaagaatcagaccaccagattgtgttaaacttctgcatacaaatacattgatactgttctcaatatcaataacatctgtacaagcaaagcaatgggccagctgcaggc

SEQ ID NO: 5134 - DNA, 766 bp, Glycine max
aatatctatatcgtttccttgtgccctccccctgattatagcagaaagtctttccaatgattatttggatctgaatggttctggttaatagcaagattccctgacctccccctgtgttcttttcttatgttttggattttggtatctattttgttaggaaaggttaaaagatagaatggtatgatattatgatgcatctatcagggatgagtaatggcatggaccattttaaaagaggagaaaaagttgctttgaaaattaggggaaaaggttttggttggttttgtttcagataagctagaagtggttcagatataattttcaaattggagaaactttggcattaaaatatgttgatttttatacagtaaaaagtggtgatctgattttgctatcctcaatttttttttcatcaatgtgttagttggcctgttcataaatctcaacctgctggcaggtcctgtttacttttgtatgttaactgcaagatttattttccagaatctgttcaatggtcaagaattgagtcagtgaaaatggttatatcaattttcttctaccgtcatgtgctgagtctaatctctatacagacctgcatacatcactattatacttgtaatgaaatgatgtgatgttttcattactgtatagaaaacttgagattattttgtgggtttccttgtggttaactagcttacttgtcaggttcagtggggtctttaattcttttgtacgatggaatgtggatggcccaacagtagtttct

SEQ ID NO: 5135 - DNA, 783 bp, Glycine max
tgacttgcttcccattcagaatctttgttccacctgcaaccattaaaagaagaaaaaaaaccttgttatactttttttgagggaaaggaggggaacaaagagggagatgcaaagtagcccaatcttcctgacattaaaatgacataccttaaaaagtacccatgttctgctgcaagtcccagcatttggcatgatgtaaaccattcactcagtgaatcctttcccctcccactaacaatgaacaaaatattcttgggatcgttacatagagcatttaagacggagatgacttcagggctggggtttttacttatggaagactgtggtacaacagtaccatcataatcaagaaagatggcccttctattggttctcttgtatgctgaaacaatatggtcaactgacaacttcctaaaaccatgagaaagagaaacaactctgaaccccaagcccaaaccaaatccccagcatcttttggtgtaatgatctttgcaggctctctccaaatccagcataaagctgcgcgcccaatatgccacatcatgagaactcacataccgatagtgtttctcatggcgcaactgcttctctgaatcactcatagtcagggctgcatacatagcatcggctacggcatctatgttccagggattgacccttattgccccactaagagaaggtgaacaaccaatgaactcagacacaacaagcatgcttgtacaaggagaatcactttttctacccaatgcttcatctagttgagcagttccctgtctgcaggca

SEQ ID NO: 5136 - DNA, 845 bp, Glycine max
tgcctgcagcacttccatattcaccataacacatagaacgtgcatcctcactagcattccttgccacattcacaggagacatatttgtatgtatataacctacacaattgggaggaggattgggattgtgcaactcaacatgctgtcctgaataggattaaaacgaaaagcacaaacattggctttttagagtttcaacctccaatatatagatctcaacacacaaattttggagcaagtacattcattagtctcacagaaggtagggtgtgtgttcttggaactaaccgatgagcatacggattccaattcttgacatgtaaatgcgatcaagaaactcatcaatctcatcagggtcctcaaaaacattcttcaattgctgaacacccaaggccattgtaggtaccacattgttgtgtctcaccttgatggacttaatcagttcagtgaattctttctcgtcattcatattcttcatctcaggaaaagatctaatttcacggaaagaatccaagtaccaatctttaacataaaaacataaaacagtagcacaaagtttaatgatcaataaccatctgcaaaaccagaagttaatcaataaacaaaaaatgcacaactgaaaaaaaaaacatcaaattcactgaaaatcaaatcaaatgacattttttttattaaatacaatttataatgacttcaaaatatctcaaaccaagcaatgtgggactttaaccttttgaaatactaaacacaaatataacaagaacctcacattcttatatgccaagtgtcaactgcaaaataggtttagcatgattgtccacaaatacaagacagaggacaacaat

SEQ ID NO: 5137 - DNA, 832 bp, Glycine max
atgcctgcagttccttcaaaaaatttcccacaaccagcaataaactgtagaaagcgcgtgcaataacaaaataaatataggattttaaagtaggacctcttcataatatacatacaagcatagacaaaaaggcaagtcatatacacagattccaagcacttggcatagcttttagaatcaatttattgtattctttcctaagaactcttttcttttgaacatggttcatggcaactcaataaatgaaaaagataagactgatcaatcagcttaccagtgtatctccagtaaaaacagcaggttactcctcctccttgccagtaacacaatagcttatgtgacctttggtgtggctgaagtaggtcagaaaaaatggtttatgttaacaaaagagagggaaatgtgtaggtccaaccacatcaggaatcatcaagcaacatgtatttaatgataatgacaatgaagcagggtagtgcctcattggtcgcttataacaaaattcaatgcatctattggttttcactttcagttttcacacatagatagtgctatcgctaggaaactctaatcttgcatttggagtaatatagctttagaattaaaatgaaatgatttaggacctatcagaggtgtgaagatgtacatatcataacacctcagaatgatttgtgtgagttggattcttaaatgagtatcaatccctacaacttttatacaacaattcatttataaacaaaatcacttctttcattttagggattcccaactcaggcaagtttgctactaaggacgagcacactaagcagcagcacgacacaattcagtaagcagc

SEQ ID NO: 5138 - DNA, 704 bp, Glycine max
aaatgtgagaagtgagcaaagtgagataaagtagtgattaggagagtgagaattgcaattcatacttgatttttgtattttctcctattccaattggaactcttccttcagctaagagtgctgccacttctgcatcggtttcataataatcagcaccaagcatcactgtatcctgcatataagtgtaatgcactagaagttatagaactagatgagggcacacgtaagaaacgtaccaaatttatgttccaccaagaatattattatatttccactgaagaaaaactattaaatgtttaaactacaaatttgagatttgctacagtgcacaacaaatcaggtatgtatggcattataatggcaatgttgacaacaatatgcattatcatcttctataattatttgatagtgtttattatctttttactccctaaattttttaaaacttatgttttttagctcctgaactttttttgactggttttagtctctttattttttttgtccttttgatccttattaagtaaaagtaatgacaaaaaaagttaaggaattaaaaaaaagattgaaaaaaatgttaagagatattgatcagtcaaaaaaaagttaatgactaaaaacagaagtcctaaaaagtttaggaactaaaaataatagtaatctccatcaaatatacatggttgtatggtggaattggttcacca

SEQ ID NO: 5139 - DNA, 690 bp, Glycine max
attgttgattcaattatatcacatggaagcttcttgaataattccttcatagagcacagtgttgttggaatcagatccagaataaactcaaatattcatttaaaggtttggtgaaccaattccaccatacaaccatgtatatttgatggagattactattatttttagttcctaaactttttaggacttctgtttttagtcattaacttttttttgactgatcaatatctcttaacatttttttcaatcttttttttaattccttaactttttttgtcattacttttacttaataaggatcaaaaggacaaaaaaaataaagagactaaaaccagtcaaaaaaagttcaggagctaaaaaacataagttttaaaaaatttatggagtaaaaagataataaacactatcaaataattatagaagatgataatgcatattgttgtcaacattgccattataatgccatacatacctgatttgttgtgcactgtagcaaatctcaaatttgtagtttaaacatttaatagtttttcttcagtggaaatataataatattcttggtggaacataaatttggtacgtttcttacgtgtgccctcatctagttctataacttctagcgcattacacttatatgcaggatacagtgatgcttggtgctgattattatgaaaccgatgcagaagtggt

SEQ ID NO: 5140 - DNA, 811 bp, Glycine max
atgagattgcgaagcatataaactttactagtaaaagcaaaaagaatacaaaacacaatatttgaacctatatgaaagattcactagtgcatttaaaagcaatgaactggaattagctgtggaatcaaacaaggaggtaggcttcaagagccagactcaaataaaaacttgttataatgactgacagtacatgaaaacatgcaaactaattgatcaatatagattttgtcattgaattacataatgagaaatgctagatacgcacttcaaaacactattattaattgaaattcatgtgagactcattgaatgtgttgggtcccactccctatttagaggatcctactatcaatttagttgatttcacactaattttaactaataataaataatgtgtcgtattagatagaccactcaataatgcgagttaactaataagaatagtgacaattacgaagacaattggctcaattcaatgcaaaatgtctacatataaacatcatatcataaacagaaacaactttgagttacaaagttacattcttagtagaagaaaaattaagggaggaagatccttattcaatgatgcattagccacagtgccaaacctttctgaaccgttctgcctcgccttctcttgatgtcctgaatatttgaacaatatccacagtatagtttgaatgtgtttctgcatgagtgttcttcgtatactcttcaatctagtgaaatcaaaagggacacgatgatattgtcaggatcaagaacagaagctccagcaacaggtcaaatttaaggactgcaggcatgcaag

SEQ ID NO: 5141 - DNA, 916 bp, Glycine max
ttttgtgaggaaatactccattcagtggtgagtttacttttcttgtgtttagttctttcaagggactgagcatggcaattaaaagtttcaatttctatgttgaatgtcaatataaaatatgcataataatgccacgtttctttgtcattttcttatatcagtttgtttagtagatgagttattttgtgctaatactcactacatatcaatgcagattatgtgacctgaatcatgaaatgatgcatattactttgggttctataatgaccttaatttttttttattttgacattttcatatgaaatgaacatttttgtcatgtgtcatggatctctttgatatatggttcactatgctggatcgtaagatgacaaacttgattaagatatgtatttttctttcttttgcttgtgtattctgaattggtttcaacttttgttgattggattttaatctcttgagatgaaaatgtgaaagccatcactagaaccttacaattcaatataaattaatgttggcaacttgcgactgaactttgtcacaaaagggtcatcgttcatgtgactagttgtgaatcattaaaaatttcccttcatattgttaggccaactgcctaccctatataataaacaaaggctgaaaaattcttttataacttttcaacctccacgttgcaaaaataataatataataatcaggtactttatgatcagaaccacttttgcttaaggcaaataatttgggccggccttgtgcctaaaatattttggcaacgtgtttttgagatcaattggctgccggttaacacgatgaaaccggtccacatgctgcaatccttcccggataaaagcccccctcccagccctggagggcgggtttcttgtgttccaggctcatattggtaaaaccaccaacc

SEQ ID NO: 5142 - DNA, 716 bp, Glycine max
atacctgctaatgcatctaattgcatttggtacttaacacccaactactactcttaggaaaatttcactagagcatcacaattccttattggaccagtattttttacatctcctttcccttggattggttgtggtccaaaaaccttactgaactcacgttaacaatatgtctatattcatatccgacattggtgttctatctatttagcaaatcgaatggaagtatgtggtaacacattacaaaatcaagccaacaagatagagcataagcaatagcttgttttatatggcaaaataaaggatgagaaccgtgaatctggctctacatgtaccttctggttttacaaataatagttagaatcaacttgaaagcctctgctccttgcttatttgggttaagttgtaggatgaatgtcacagcttatttgcaaaatgctactttataaataattactatttctttgggcttgtatttttcttaataatgagactttaaaaattcgaggatagggctgataataaaataaattatatgaaaaaatcatcctatttttttatccatcgtggcatcgtgccaaaaaaaatcgtggtaatagatgaaattctccaaagtccaacctcattacttgacatgctgaaaatggtatcgagaatcaggttatgttgcataatttttcagtgttgtcaccaatagagtaatttagaggcaaatttga

SEQ ID NO: 5143 - DNA, 751 bp, Glycine max
gaactaatatatgcccttgtcaaatatatataactaacaataatataacatgtgatttccaatttacatataatcttgcagctttgtaccagacaggagcgtacaaacacttgtatagtgaagaggatgttaagaacctcaagtggctagaaatatttcagtaagctaattatttttgctttagattttagcatatcagtttatatcttgtcttcaacttaacgtgatgaatacataatggaactgattatgtttcttataaattatgtgatacgaaacacagcaagtatgatctctacagcaagagcaatgtgctaattgatgttgaaaaagttaagccatactatatgtcgctcattaagaaggtgggcaacaaaacttgtgtgatgcctgtatcttaagttagatatactttaatggaataaaatatcctttttgtgttatcttcattactaatttctttcttcttgggttttgcagtatttcccgccaaagctcatatggtaaatctgtctagaaatactagtaacatattttataatgtatttctttttaacacattttttactattatctgaaatttgtttaaagttataatattatatgagtctcagtgagctctatttataatttataatttttaatgagtttgaaataatagtatagacgtgtatttaaagaagtgtgtaaaaaattgtattacttgccaactatcttaaatattgaattaaaggcaaaggaaagtggagat

SEQ ID NO: 5144 - DNA, 792 bp, Glycine max
tttccttgaaggtttacttcaacgtggtttggaaagatttgctacattcgccaaaagctacacctaaatttttattatgattgtcctgatttttatagcagggctacatttctaaaagtgaacatacctgattattttcatggcgatctcattctgtctgaacattgattgaattactgttatcatgccaatttttggttgcatgaatggttatcccattttgaagtgttaattaattatgtataactctgatagacggtcttaatgcaaaatgaacacatccgacataatgttaaaggtctgttcttaaatccgcaatcctaaatttgtaacgctgctttgagcacttcagaaatgattggatttggatcctagcaagtaaaatttgccaaaccatctcgaaacttaagctccagagtcctatgcggagtatatagatacatgtcctaaaatgagtatatgtaattgctaacagataatggaatagaagctaagagattccatttattgacgcacaagaatctgacatgaatgtggcagtcatagtaaaaattgactatagtacaaaataataatgtaacgacaacacatatttacaccaccatcctccaacccaggctacgtacatcaaccgaccacgtaaaaaaatgatggcagctttttccaatgtctaaactgaagcaaccgaaaacagtgtgtataatcccaacaacacattattagatgaaccgtgtatgtacatacattcagttgcttgcactgccttccaacaagctcctcaagctacaaaga

SEQ ID NO: 5145 - DNA, 756 bp, Glycine max
cctgaactaccttcactccaatgggatagtgcattgcgacgtgaaggggcagaacgtgttggtgacggagcaaggggtgaaaattgcggactttggttgcgctcggagggtggaggagtcatcgtcggtgatcgccggcacgccgagattcatggcaccagaggtggcgcgtggggagcagcaggggttccctgctgacgtgtgggcacttgggtgcactgtgctggagatgatcaccgggacgccgccgtggcacggcggtggagacccggcggcggtgatttataggattggattctccggcgaggcgccggagatacctggttatgtgtcggagcaggggagggactttttgggaaagtgtttgaagagggagcccggtgaaaggtggtcggtggaggagcttcttggacacggttttgttaaggagtgcacggaattgaagttgttggtgttggattcggacactcccactggtgtgttggaacgaggtttttgggattcactggagacagctcagcatgaagcacttgattgtccctctcctagggacagaattcgtaggttgttttcggatgagcctgtttgggcatcgaacgatgacgaatgggtcactgtgagaggcaatgagatccatgacatacatttggaggctgagggtttgttctttcaccaaaccaacactactttttgtaatgtcgttagtgatgaagacaatgttttggtaactttttgtgatcctgaaattgtagaatc

SEQ ID NO: 5146 - DNA, 766 bp, Glycine max
aaatcagaatcatgcttggacaacttgcagctagaaaccataggagaagaaataggtttagattccaacacatcaatcttgaccaataaatctcgatgtagtttgatagagtcataagtagagacccattagattaaaaatgaacctcaatgcccaaaaaaaatcaagggcaccaagctacttgagatgaagaactaccagcgatgatgataaaatcagcatacagcaggatataaactgtggcagttttagttttgtatgtgaacaaggaagggttgcacttgctgtcagcaaagccaagctgtaacagagttgttttcagccattcaaaccaagctctaggagcttgttttagaccatagatagccttatttaacttgcatacgaatgacttgtctgatgacagaaaaccttatggttgagtcatatacacctcttcttgtaagaacccattaagaaaggtattatttacatccagttataatagagtccacttgtaactgagagcaagagtgagaatgacccttatagtgacaggtttgataacgggaaaaagtttcatgaaaatcaaatccaaattgttggttaaaaccctttgcaaccaatcgatctttatatttgttgacactaccatcagaattttctttcactctaaacacccacttacacctaattgcaattctattctgaggtaagggaactagagtacaagtataacttatttgaagagcattgaattcatcggtcatggtagtaacccatttag

SEQ ID NO: 5147 - DNA, 833 bp, Glycine max
tcactcgcccccggtgatcctctaaagtccacctgcagccttgttaattaattcattctttcacagctactgcattcttcttgaaaccaaactcaattgtttcttatatattaattgcatgtttttcaatatttttggacaaaataaatgtgaacttgccaattatttcattctttgatattttttaattctatggcggatcagttcaactgtaaatcccacgataggatgcatgtcaatcatccttttatattcttctgttcatttatcgctgaaaaacttagtgtgccgtgggtttgaattatgttggatttattcaaactttacctgtgctccagcttctttattggctgcatattttattttttaaaatcagaaaaacatatttcattaacttggtacctgaagtacccaataaacaaagtacataattcaaattccaaatggaagcaacagggttaagatgtattaacatgcagtaagaacatccctacgcttcccaccacgacccaacaagaacaaaagattccaaaggccaaatgctttctccaaacccacaaatgctataaacatcccacccaactatcccttttctgaatttgtaatctgcctacacgtatgaggttatgaaaattaccaccatatgctgcacttcacccatacctttcgggttctgcttccctgtataaatctttcagcttaactccttataacctaatgagacatgctggactattactgctccattgaacaaaggaaaaattaaaattcggagtcaacgaacgtagccaagaccaaaccagaaatataacatcctgtacgagacagatttt

SEQ ID NO: 5148 - DNA, 765 bp, Glycine max
tcttcatgaaaaggaccagcttaccaaaacatggggagggccaatgtatatctacattttagtggcattcacgtcatcaagtagatgactgatgactcttccaaactcatggactcatagtaggcccaatgttttcaactgctgaacatgttcgggtgggagagccgggggagaccaatccgatccagtcagctctccatcagcgtcttcaaccacatactcctatgatgagaagcaataacaatttcataatcaacaatcaagaccatgtcagaatttttcaggacatcatgatgttctcataaaacacgcagttagcacatgggattattggtactcaactaatctcaaactgtttgtgttccatgtcaaatgtaatccagaaagaggcccaaaagccagccttaaggcatcaaaataccagattcaagtctaagcccaattactatcacacccggaaaagcaaatgagagttgcaaaatcaaatctaaaacccttgccctatcagacagaaaaaggactaaggaaagagaatatatccaacaaaactcttcaaataaaagatgatgaaaaactcaaactatggtaaacttccctaatgaattgaatgcaactcccaaatggtgaagacccatcaactctcaaaccatgagtcaaatcccatcctcaccagccaattttgtgtgcagccaaatcttaaccgttgattggttatttcacagtaattaataaagagagaaaatattataaatggtccaaattttg

SEQ ID NO: 5149 - DNA, 814 bp, Glycine max
aatagcaccagatgaactgcattcatagttacagttctgcaccagaaagctcttgctacagaggaagttgcatacatacatgacaacaaaactgtgattccatcccatgatttgtgccaaaccagcaccatttcccaaacataaacaggacaaaggagaaagcagtggtaataaggagaaacattctatctcaaaatcaattccgatctcacaaatgcacagccaaattcaaacagagagtacacaaaactaaccacaaataagagatttcattaaactaccatctcagaataagttccatatctagaatttaagattaaagtttaaagttcccacagtataacttcatccttgcagctacatacatagtggctacaaaagcaaagtagtaaactaaagcatgtgatttggaacaatcatcactgttgagagtattattctataaacaaaagaatgaaactatacttctgaaatttcaaaagcgacattgaaatcaacaaaggcacacgactgctcctgggaaaccccaccaagtccatccatccatcaaatcctcggatgtatcctaagcagccaacaacagaatgcctctccccaatctcaacgctacctctgtcaaaaaccaaagccaaccgttaattcacacgcaatccaaaacaaaacccaaaacttaatccttttttcaaacctcaaatgaacaaaattcacaaaaaagcagagtgtaacattcacataccttgccagtctcagcatcatccggaaccttgtaggaatcggcacaaacctccgacaaccactggccagggaaaagggt

SEQ ID NO: 5150 - DNA, 792 bp, Glycine max
tacatgatcaaattaatattttcatttaatatttttgcatagattcattctatagatgcatgtccatattgataaatgaacacaaacagaactagctagatgtagaattcaatacattctaatctaatcaattaataaagcaataaagctttctcttataacattggtttcatgaatattggatactcatagtcatagccttgactagccatcccaaaacacgaatttttttttcttgggttaaaggcaaaagactcatctaggactatggttagactgcggaaaaagaatggaatcaaatgatactaagttcaattatcaggattgttaaaaaaaaaaagaagatgaaatacatccccttttccttccctccaattcagatagcgataatactgaaatcatctattttcattatagaatattcaaataataaaatagtaaatttattttacttcatcctatttcaatgcatttttcttctaccatattccattctgctttaaatttatcattatatacctaaacttgtaaactttatttttattgtccattgtttcttgaggtgaggaaatataggaccagtgtgcttctattttagcggcgcactatgtatatatggaagcaagtgtaactggtaattatacatgaaattgcgaggaacaaataaatcattactacatttttttaaaaaaaaattatggtcgatctatacatgtagttgatgatcgttcaccacatctaggcacaagaatcaagagctcatgccttttatcctatccaagatagctgcaa

SEQ ID NO: 5151 - DNA, 706 bp, Glycine max
tttgcctgcaggtgcgatagaataatatggtttgggaagggaatgaagcaaatccaatacaacaggagcgagtcaaaactttctgatcataggcctgtacgagcaatgttcacagctgatatcagggttgcagggacttgtaaatgattaaaaaagttacaaaggcaatttgtccaagaaattttggttttaatggactaaatttagtcatggaccaaaaccagacacagacaccggacacctaaccaaacttagtcctgggctaaaccaagcatcggtccaccagtcaaacttagccatgtgaccatttctcagatgaaaagttttaggatcctaggaagacattagacatgcatgtagtagctgaattctttgcccatcaggataagcatttggaatttatttcttgcctagagaaaacataggaagcctgacaaagagttgctctccatattttttggagggagaaaagggggggacatggtgatgcaaatcgtagaaatatggcatgtttgtactataaactcgtataagaaactggtattatgacttcaaattcagtattcctatgttatgatatgtttaatattcacccaacccaaaaaccccatcagttaattatttgtgaatacgtcaagattaggccattggatgaatctgaacaaattattaaatgacaaaaaataatgcgctaaaggagtttttt

SEQ ID NO: 5152 - DNA, 734 bp, Glycine max
tccaccaataataaaatactttaatttcaccacaaagtatatgaatatgaatcaaccgtttggtttataagatgcaagtagttaacatatattataccatgtccttttcccattcttcttaactgggccacatattctgagatctttttaatgtcttccaccttaggcaacaaaaagaaattaatgagaacaatgtttctcccatgctactcaactactcttgacagcaatagaaagaatcacactactggacattgatttacctgaccaaccaaaaactcgctttcaagaaagtcaacaaattgcacatcattgttttcatttgctaactgcatatatagtgacaaaaactagttattggcattcaacaacatagtaagattccattgggaggtagtggaattaaaaaggtttgagttgaattcacaaaagtactgagaaaatagaactatagaagtgacgtacgctgtgtaaatttagaagcttctcattattcagcctttccaaagataatgcaagttccattgctgcgaaatagggcgagacagaaatagtaagtataatcatagaaaccattcaaattcacgaataatagaacaaaacaacactcatgaaagatgagcaaaccaaggtaaaaataaaaataaaaataaaagttcaatatttattaaatattatatatatatatatatatatatatatatatatatatatatatatatatatatatttat

SEQ ID NO: 5153 - DNA, 747 bp, Glycine max
gcattcttaatttgggagtgcattcttaattcgatcacgtactgcccaaattaagaataaattacagatataaagtttgagtgaagcaatagatattttagagattttgtggcaatatatctgctggtcttgcgcctatttttttttaaaaaaacagaaggaattaaacaaactacttgttaatggttacaataaatcaataaatggccaaatgagcatagggaaattatgttatctcttcatatatgataataaatacgacctaaaaaatatccaacgaaaccataaaacaaagcctaataagtgaagaggcataaccaatacataattatgatttatgaactttatgttaggtagatcaggactacgacaactgataagtgaaagtttgcaatttataattttcaactcccaggtaaaaatggaggttacatgacaattacagtttccagtgaatttagttcatcaggtatcaggttttaaagttggttgagttgattcatgtgcaattcacaccccttaataacagaagggtcaaagagttcaagatcatcctccatatcccccgcttccaactccagcacttttaatattgaataaatatcctcccatcttggatgagattgatctgcaacacgaaactcatgaacttgtccatttaactcaagccagctataacctggtgttttctttagacctctatctctaagaaaactcctcattttagcaactttgtcccactttcct

SEQ ID NO: 5154 - DNA, 748 bp, Glycine max
aaattgtttatcgatcctaatctgattgcccaagtcagttggtcacggtgtgtataatcaccatctttggtcactgttaaacaatcctaatgaagctcgagatctaagtatacaacccatcttcaaacaatcctaatgaagcttgagatctaataccagtatatggaatttcatgaaattagcatcaaaataaatgaaggacaactttaaataactagctttgagtttgagattctttagtatcttaaaatagtctgaactcacagagtttcctatacaaagatgcctacagaagatacttgaataatactattagtacaagcattttttaataggggtgaacatatgcaataaagtagaaaatcaagagaatggttagatgacagaagactaatacacaaaaatacagaagttgcacatgcaagaaaaaaaaaaaaagcaaatgaaagaaacatggatcaaactaatatataagttccttcaatattctacaagagacattaaataatgttcaaagttctcttcaaaactaaccatttatgacacagctgaaacttggcaaatcaatgtttattattctcagccgcattctcttctttcccaagtgcaaccactactttcttcaagatggattctgttggttgatgagaattctcaacagcctttgagattgcttgccatttctctccatgttttggttcagcagcaatacatctcttcagtacatccttctggttctcctcagttc

SEQ ID NO: 5155 - DNA, 740 bp, Glycine max
tccttataatactcttatagcttgaaacaactgatttactagctcagtagcttaatcctgtagtgagattgtgatactgcataaaatttttgtttcaagccaatttgtttagtgatagaaaggtaagagaagaaaacagcaagggaccaaattgaatgaatcccaaagcacatgaagcattaaagataaaattcaaatcatacaatgtaagagtgtataagtagtgtatacgagtaactaactacagtaaatcaaaaagctctgataccatattagaactctagagagagagagggaaagagatttgtatatctcattgtagaatttacaaaaggcattgagatttctaacaataacagtacttgtactgttgagattcagttgtaactgaaaagtaactaaagctaactgttaactaactatagtagtaaactaaactaagtacactacttatacactcttacatacaaggttgcatatagtgatagacattagtaattgtgtttttacataatcaagaaaaaaatcaaatggtatacttttgtcactcccagaaaactcatgcatgaattgtattgtcaaaaaccagattttattgaggatcgggatggggtcaaagattgtaagtcaaaggattttaaaacagattgtaatacagatcataagatcccaccagaagactcacaattatacatatgataaaaatgacatagataaggggaaaaaaggcagtagcagta

SEQ ID NO: 5156 - DNA, 839 bp, Glycine max
aagaagaagataacgtacaagcatcaatcaagctctcactgctattccccaaaatatttcaaaaaacaaaacaagaagaagaaaaaactgcaatgtatggaaaagtggttctctcgttcatcttcgtgctcttgctcgtcttctcttactcaattttcattggcaccctcgacattcgatcttatttcttccctcgcctaaagttacccgcggctgcacctgctccctgtgcacccgagcctcctcttcgggttttcatgtacgatctccctcgccgattcaacgtcggcatgattgaccgccggagcgcgtcggagacgcccgtcaccgttgaggactggccggcgtggccggtgaactgggggctgaagaagcagcacagcgtggagtactggatgatggggtcgctcctcaacgccggcgagggcagagaagcggtcagggtttcggatccggaactcgcccaagcgttcttcgtgccgttcttctcgtcgctcagcttcaacacgcacggccacaccatgaaggatcccgccacgcagattgatcgccaattgcaggtgcgtcgctaggtttctcgattgttccgaattgattggtgaatcattcaaatgctatgctatgagagttattttcacagctaggttttgcatgtttagccttagaacgcgattagtatgatcacttgaagatttacgatacaggatgcttgttgaacgacattagatgctgaaaatcataagaaatttgatgaatgctaatgttcacaccagtctagaaggtaggaatatcctaatgaagttttctcaggatcgcacgagttgaactctgcttatgta

SEQ ID NO: 5157 - DNA, 728 bp, Glycine max
cagccgttgcctgcagggttgctgcaacccctacctattccaactaaggtgtggattgatatctccatggatttcattggaggtttaccaaaagctcaagggaaggacactatcttagtggtagtggataggcggactaagtatgctcatttttttggattaagtcatccttatacagcaaaggaagtaactaagttattcattaaagaagtggtgagactgcatggtttccctgcctcaatagtatctgacagagacaaactttttatgagcctcttttggaaggaattgtttaggaaagcgggcacccaattgaagatgagcactacttatcatcctcaaacagatgggcaaactgaagtagctaacggatgcttagaagcttatttgaggtgtttaacaggaacaatctgctcaaggctctggatcaaatgaaaagatctgcaaacaagcatagaagggaactagtcatgtaggaaggagattgggtctttctgaaactgcaaccttatagaatgaagtttctagcaagaaagccaaatgagaagctaagtccacgattttatggaccctacaaggtcatacagcgaattcgggaggttgcttataaattggaacttctagagggtagcatgatacatctggtgttccatatatccctgctcaagaaagcggttaagcctacttgttcccctcaaccattaccaacagccctaaatgagaattgg

SEQ ID NO: 5158 - DNA, 860 bp, Glycine max
aacgaaaggctatggaaactgagagccagcatgcatccacaggagtggtgtatgacagtatttttgcaatgcatccttctggcaaatcttgcaactccatcgatatcaactatgatgctgaagctaagctagcttctaccttatattaattaattgtctcacttcgtatttggatgatttttttcacaaaccgattggtttgatttggtttgctgtttgtatttctgaaaccgatccaatccgaatcaaatggcagcaattatattaacacttatattatttttattttatatatatgtatcatttaagtcttatcatattttatagtgttatctatatgaaatttatataatgtatatattttttttttcataagatttttttaagatatgtttaatttaaaatagatgaaattttatagatttttattataaaaacttaatatattaataatttttgtagattattattaataattttttgatgtaattttatttttaaaatatgaaaaaagtatataaattttaataaaacaatattttaataaaaatcacaaaaactaaaccgaatcaaaccataaaatattaatttggtttggttcaaattttattttaaataaaaatccagccaaactgaatccatgtattttttaaatttggtttggataatttatggatgaaaaatcgaactgcgaacactctaacctaacatatggttaatgaacctaaccaccaaccaatcggaaaccatagtcacttctccaaagtgatgggagaaatgaaaaatcctccactcactgcatgtctattaacctttgaatcctttgtaaaaaaactagctctacaagatacatttgctcc

SEQ ID NO: 5159 - DNA, 761 bp, Glycine max
tcctatacaagtcatagttccttgatcccagctacataacagtatccctgcaaaactttcttagttttctttctcatcagctgtaatgcaaacaaacaccttgagatctctagcaatggcaaatacagccaacatcaatgctaaaaacatacaacagtgcaaccaatcctgggtttgatttgataatacccttggttgcagttaaataaatctctgacctattgaagccctataaatagcagagaatccagagataagacactttgaatctcaaaaccaatacttcatcctgaaagggctagaagtatctatttgtcaccatctggttctaactggcgcactgatcaccaatctttgcagagctaccagaactagaaaacaaatattcataaatgagttattcctcaaacgattgcatggatattttctccaatagcagagggcaatcttctccaagttgccgtggatttagttccatggcaactttaaaatcatgcaaagaaactgagcatggtggtctgtgttcaggcacagcttctgctgacccaccagcacactgcacatgtaaatgattatttagccacatgtcgttgatgaccttaccctgcatctgctgtttgggggcaaggggcttcctcagctcatttgtagacctagttccaactaattcaacacaggacctgatcaaccgtttcaagtacacatccaacatactattcaacatatttgcacattccatagaaacagctccaagaccttgt

SEQ ID NO: 5160 - DNA, 793 bp, Glycine max
aaggaggcttaccaacacttattaagatgtgggaatattggagctgtaaggatgggaattgttccttggagtagtaagattggacctttagatcaattgttccttggcgtagtaagattgtacctttagatcaaaggacttgcaaaaccaggatgaatgggaaagccaagatgtacattgcaaactattgtgagcattcaagaactgagagacaaagtgacataatgtaagatagagaagagagcataagaatcttttctcctgtttgtgccctggcttccacccactaaacccaccagcatcacaccaccaaaatcacgactccatcaatgacagttgcaacaaaccaagctgtccctaatgtgcgactgtgagtgttttgaccctttcttcaggatgaagggatttatatactatattttggtcatatcactagtcgatgtgggatctccaacacagttattcaactgcactctcaggtagttagtaatctgttagattagtggtgacagctgtcatagagacagctgttatggttggttaatgagaatcaattactttttcctctttcatttctagcttctctgaatttctaagatggtatctagagctcagtaagatcaacaatggtcgaaacttgagttgagtaataagctgctgaactaactgagaggaacttctagtgactatgatgtcatctatgtacactagttaaacagtttggaaatgagtcttgtaaacaacgagagaagggttgcatttgctggctttgaagccaaaatgcagtagagac

SEQ ID NO: 5161 - DNA, 756 bp, Glycine max
tggtagagggtgttgtaatgcatagagcagagtgtggaactgaggaagatgctgaacaagatgaaaacaaaggaagaagatggaaaacatcttctagttgtttctatttttttagtttttagaacacttgttttgaaaacaattttcataactttagattttggatgagaaattgactgttgagtagtgtgaaattttttagaaaacagtttttaaaacctaaacattaaaagagaatcatacgggcagtaagtttgttacacagaattctgcaccaattgccaatttaattactccagctctcttattatcagaatgcctttactttctgtatgtgatctacatttgactgttgtcatgcgggatgctattggatcaatcccaattaaaaacttatggagattagagaatggaagttattgcttaacataataagttcatccatgattattaaatattcattttggatttatgccttcgtgggtatataaaagataaaatttgtgctttcagcatgttaaatgtctgtttatagcatatcttgtttgaagtttatgtatcctgttatccaagtggaagtactagctgaaaggttacttttacagaaaacaagagaagaccggagctcaccaaaatcattacagcctcctctggttctatgaaagctgatgaagttgctcagaaagctttggatggtataaaatgtggcgattttattgtttcttgcaatttcgagggaattgcactatccctagc

SEQ ID NO: 5162 - DNA, 742 bp, Glycine max
ggacccggttatgttatactatccacctgcagtcagtgctgggaatgattattcagttggaaacatgatttctgaggctctgcataaagtaggtagaatgggagtagtgacaattgaaaccggaaggagtactgagaattgtctagagattgtggaagggatgcaattcgatcgtggatatctgtcaccatactttgtcaacaatagaagaaagatgacagttgaactccacaactgcaaggtatgacatgtaggggcatttggactttggaagaacttgtacagaatttatttgagtttataaaagtgcttatggttatgaccatttgtataactttttaagctcgattcaacaagcttatgatatcagctctaatgtgataaacataagttctgtgtggataattgttctgcaagcagttccaggagaagagaataagaaggtaaaatgaattgagtttctctcacaagttaaaatcgatttatgcactttaacttaaatagaagccctctcctttaacttctctaaaagttgatgtgataagttgattttagcttatgaagtacagttcattttacattcttattttcttctcatataagtatttatggagaagtttgtccaaacaagcgaggccttacaagataaacacttaattaagctctttatcaaagggaatcaggtatataaaagccttaacttctattaaataattagctggtgcataattctttggctgca

SEQ ID NO: 5163 - DNA, 706 bp, Glycine max
aaacatcacaatttaacagaaagatatgtgactgcaatcaaaatatagccaatctgttagaatttattcattaatcattcccaagttaattcacaatataagataaaatggtaaaaacagtgacaagaagtgtttctaaccgggcagtcttccatgataatatctctaaagtagtaaaggccgcctgctgaaccatgcggtttatcctccttcaaatatctagattgataccagtaacacaccatgatcaggtccagcattttacagagcttaacatactttctcttattaaagttgcatactaatgcactagtcaccttactggtaatttcagctcatttgagattgaagagacatatagagcaaattctcgctcctcatagaatccaagaagaaatatttgagccaaattgggtatctgaagaagacaaaaactagtaagtaaaaacactccacaccttttaagtaacatatcaggtctcctctccttttaatcagtttttaagctgagattcaatttgaattttagactaatgaagactgtatgtatttacacacaaaaacacacacaagcatgcaagtcgacaatcaacattaaaattgaagcaaacctttttacaagcagaaataggatggtgaaccattggctggccagccaaagggaaaagcggtttgggaatattgaaggaaagaggtcgaaatctgg

SEQ ID NO: 5164 - DNA, 663 bp, Glycine max
tagatcttttacttcttgaattcatttagagtttcttctgatatgagtgtatgcgcttacatcctgggacttcattttgtcccttccatttgtgcttagtgacttgcttatggatgctcatgatgctccttctccgatgtttattcttgccataaattatttaggatattttccttttacacggttaagtgtgcttaaccctcaaagggtgagctcttaataccaattaaaatggattaattgatcactagaatggaggttgaataataatactaaattgattttggccttttctgcacattcaaaatagtgcttctgatatttcctttaaagcctctagcttggatatcagaagttagttttaaggagatacttcctttcttatttgagatatcaaataattagtctatgtatatcaagtatcttataaagtattatttctcaaaagatttagaatcaatctaaaccttattgccaaaatcaattttttatacttaaaacttatgttggttatgaagttataaacctttttaaaaaaaatattgtttaaatgtaataatgttaactcaatgtaaatctaaatacttatcgaaagatatgataaagatgaaacaattaaatgcatgggaagcataaagaaaaggaagtccgcacataagattt

SEQ ID NO: 5165 - DNA, 731 bp, Glycine max
ttgagaagaatattgggaaagccaaaggagacttaaggagaaagaatacctagtggttggtgtttgtgttaatagaaatcctacaattataggaattgaatgtagtcaaagatttatgggtgaaccaatataaattctatgtgcggacttccttttctttatgcttcccatgcatttatttgtttcatctttatcatatctttggataagtatttagatttacattgagttaacattattacatttaaacaatattttttttaaaaaggtttataacttcataaccaacataagttttaagtataaaaaattgattttggcaataaggtttagattgattctaaatcttttgagaaataatactttataagatacttgatatacatagactaattatttgatatctcaaataagaaaggaagtatctccttaaaactaacttctgatatccaagctagaggctttaaaggaaatatcagaagcactattttgaatgtgcagaaaaggccaaaatcaatttagtattattattcaacctccattctagtgatcaattaatccattttaattggtattaagagctcacccctttgagggttaagcacacttaaccgtgtaaaaggaaaatatcctaaataattatggcagaataacatcggagaagagcatatgagcttcataacaagtcctaacacaatggagggcaaatgagtccagatgtaccttcctct

SEQ ID NO: 5166 - DNA, 719 bp, Glycine max
gcctgcagatttcatttttggaaattggtatcccataaatagccccataaaaaatccataacctctctgttagggcttttttggaatcaaaacaagcaccgctatagctactattcagccttctatttggtcgactttggccactatagtaacccgttccactacagcagccccagattccagtagcagccaggggtcactctgctttgctacgccactataaaggtgttatttaaaactctgcttgcaattgggccattgaaagttatatttattgtatcatcatctaatccctagcatccataatgttgagcatagaatactgaaaaatggcatcaaccaaggttcaaacttcaaactcatcataactgtgaagatcaattatggctacaaatggtggggatgaagatatgttatcatcatagcactatgctagaaacattgcatatgtaaaatttatagtatctacaccaccagaagtatatgttgaactttatattccagactaagtattggtgggtagtccaaacattagttacgagaattaatataaagagaagattgtttggtttcacgtttcaacattgcgcaggaataatcttttaggagagagacatttataatttcaacctataacatattatctttattaattcagttgataactcaataaacaaaccaaaaaatgtttgatcagtgaaaataaatctaaaaggact

SEQ ID NO: 5167 - DNA, 784 bp, Glycine max
tgcaaattgattctgcttctgatgctgaagaatttgctgctgctgctgatttcgctgcatttgttgctgagaactggctgcattagtgctgatggcagcaggcataacagaagtagaagcccgagaagaagcagaaccaaggtttagattacgacccgaggtatcaatcacattgttgccgcccgataacgacgctaatgagggatcagatacttctggccttccgaatgcaatggattgtcccattgttgccggaatttttccagcagatattgcttttctatcttcgtctagattagaagaattaactacatttttcccttcctcagccgcatgataactcttcttcaactgagcactggcagcttgtgctgctgccattatatgatagttatgattactctgcatgattgaatggttgttctgtgcaatagatgagaggtcaaggccagaggcgccagtagctccattcatggatgcaaatgacatggcaaatgcaggagctgtttcacctccagcctttggaccagggtgctgctggggttgcttcttttcactgtgactgccattggagcctcctgcaccaattgaggcaggtgtcatcagagcaaagtttggcgactgcataggcattgcaaaattttggccataaatattcatggtagcgcgagcgagacgactatcagcagtagatggactgtcttcaccacccatctcagactcaacctggcgagctggatgagaagggtgatgattctgcctctgctgcggctgttgctgttgc

SEQ ID NO: 5168 - DNA, 816 bp, Glycine max
aagcacaaacctttttcatggctctggctagtaagtatggctgcattcacctcacttgctgtctttaaacgctgtgatatgtcaagcagctctccaacaggacagttagaaacatcttcaaaggcaagaagtgcaacagtcctctccaactcttccaaaaaactttgctgaaatccaacaggcaagtattagccccaagtctctgaaacagttacatacaaattttccacaataacaatttactttcccatattggatttttcttaactacaagcaatcaaagtaaattgacaatacaaacaaataacccattaatgtaaaggccagaatcctaacaaagattttatggaaaaatgcaatttaataccctggacttcaaatttgggtcgtatgcaatttagtccttgatgttttcaaaggtgtatttcacttcctagcttttttaaatatacaaaacaacccttccgacactccatagcaaggaattgtcttattgatagcaaattaactagctacgaaaggattattttccacacattataaaaatggcttgggaatgaaatatacatttttatgtcagagagcaaattgcacacaacccaaaattcagaatactaatttacattctttccaagattttacatgaaaagatagagataagaaaattcatttgattagatttacattttcctctccccttggtgcaagctcctcttgggcaaactctagagcttcttctacttttccattccggatgagttctatcaatcgttgctgttgaagatggaaaaataattggggatttgtgtccagtat

SEQ ID NO: 5169 - DNA, 784 bp, Glycine max
tgagaaagcaatttgatagtgtggctgttgggatatgggtctaaagggatggcttctgttccgttttccttacaatttatctgctgcttgctgagcactagtgactaaaagactcttcaaatcaagatagtcaaagatatttctgtaatgctgctaggcaaatcacatgatatactgtttaagttttttcacaattttctcgagtctctactaatgcttagattctgtccattttgcctacagatgccttattgtgttttttagactatctttttcctttagttgcctgtttttcttattttttgtgtgttgtcttcccatcctagaaatttgcattgtaatataaattgaaaacaggaattttaaaattttcgtttggttctctagctgatatgttgaaacttgttaaattcattttctcagcctttcattgtataactcctctaatctccatgattaaaccagtttcagaaaatagtggaaacccgactaatattattcactataaccaaagtcctttgattcatattttcttatttcatgaagagttttggattatttgtaaagccattatgctacgtcttgttcttgattaattgtttcatattacttccctgtatatgtgcatcatattaaaaatgactttttgaacgactcaaaagtctattattttgtataaaaactttgcttcctctaaaattcttatgatctatctttacaatttcagatccatccaggtgccttgaagcaaggaggaattcccttggttgcttgttgcatttct

SEQ ID NO: 5170 - DNA, 782 bp, Glycine max
ggaagtgaatttgaagagatgtatgttggtgttggtgcacgaagggtgagggatcttttttctgctgcaaggaagcgagcacctgctataatattcattgatgagatagatgctattggaggaaaacgaaatgcaaaggaccaaatgtacatgaagatgacattaaatcagttactggttgagctagatggattcaagcaaaatgagggcataattgtgattggcgctactaattttccacaatcattggataaggcattggtgagacctgggcggtttgatcgccatgttattgttcccaatccggatgtaaaaggaagacagcagattttggaatcacacatgtcaaaggtattattttatcccgtgctaagaatgttgtagaacactgatttgaaaaggataaaaataggattaaatcacaccaaattacagaagtttcagcaatttcctttctatctcagtgttaagaaactcttactgagggtatctctgtccagaaaactaccaaacacataattgtcccataacatccctgtcttccctacataactttaaaggggaagtagtatatacttcagcaaaaatttccattgttcatatgcaaaatgtaagaattatttactgttgtgtgttgttcagaccacacgaaatactcttatttataatgaatggggtttacaaaataaggaaacaaaataatggataataatggaaataatcacatactaaactgctgtaattaaaacatatcaaatcatatatttcacacacaacataga

SEQ ID NO: 5171 - DNA, 757 bp, Glycine max
atattgggttgtaaccttgagctcagaatcaactatgtaccttcctgtacttcagattctatatatgctaaattgaagaggacatctttcaatttcttcggttgttctcgtagaattcgttggaaatctttgccatctaatgaacaaggaagtgaatcagactatgctgattacacttctcaaaagcccatgatgaaggatcaaactcaaacttgttcctctgattgtgaacctccggtgccaccatttgagtcctataatggaatgcaggtcatgacaactttgagaagtagtgaaggaaatttgctaagctcagggaaaatgttattgaataggcaagatcaagagactccaagaatttcttgttctagagttgattctctcaaggaagagggatgcaattatgagcatctagctccatcaacccttgatttagataatcagactgactgttttccccgaacccgctggcttcataaaaagttctcttcttcatatgcatcacaacagaagaattttgttttatctatccccaagttcaaatgttctgagacttatagatatgatctggaaccctgtatcttttcccacagctctaacaactgcaccaaagccattgaggaaaagtaggtggttttgcatcttgaattatctttgtttatgactttatatcatgcatctttttttcagcgcatagtgtatgttaacttcatagagctagagtccagagacactgtttgctttgttaaattttttt

SEQ ID NO: 5172 - DNA, 731 bp, Glycine max
agtgtgtctccagataaagaacttctcccttctttaaacgagcagatgtatagagtggcttttttagacccttgtcagcaacaatgcttatactatatttgatcctgataagtattataattaattagtagttaataaatactaaaaacaagataagctacaaatagaactgttgcattcatatctaaatgaggaagaacaagaaatgttaggacctgtttgatttaaaaaaagaaaaaaaaatcctgttctcatttcccatgttcataaataattataaaaaactaccttattatcactttgtttcctattttcaacagtttgtacacaagatggtgaaaacaaaaatacagtatcattttagtaaatacgtgttaaaacaaaaaaaaaaacagtaaaacttttatcaaaccaaactcttataaccaatgttcaaagccaaaacattttggtgttacaaaaataccacaaacttggattagatattttctactccatcttaaaacacaatgctattgtattagactgtactttgccaattaatactagcataccaaggttcattgcagaggttgtactgtattgtaacttcacgaacaaatctttgctgccgcaatgcattctgaagaacgaaggccacaccaaataagatgagcatagaatgtgaaattattaatccgatggtcaatatgaaaaggtttgttgattctcagttaaagatattggacaaa

SEQ ID NO: 5173 - DNA, 744 bp, Glycine max
agtgtgtctccagataaagaacttctcccttctttaaacgagcagatgtatagagtggcttttttagacccttgtcagcaacaatgcttatactatatttgatcctgataagtaatataattaattattaattaataaatactaaaaacaagacaagctacaaaatagaactgttgcattcatatctaaatgaggaagaacaaggaatattaggaccagtttgatttggaaaagaaaaacatttcctattttcatttcccattttcacaaataattacaaaaaactaccttgttatcattttgtttcctattttcaaaagtttgtacacaatacagtgaaaacaaaatgcagtagcattttagtaaatacatgttaaaacaaaaaataaaaaaagtaaaagttttatcaaaccaaactcttataaccaagctgcaatgccaatgttcggagcctagacattttcatgttacaaaaataccacaaacttggatttgatattttctgctccatcttaaaacacaatgttattgtattagactgtactttgccaattaatacaagcataccatggttcattgcagagattgtactgtattgtaacttcgcgtacaaatctttgctgccgcaatgcattctgaagaacaaaggccatgccaaataggatgagcatagaatgtgaaattattaatttgatggtcagtatgaaaaggtttgtcaattataagataaaaatattggacaaa

SEQ ID NO: 5174 - DNA, 777 bp, Glycine max
aagtgtacaataactataaaaatgcagtaagtttgtatacatgtcttatgttcatatacgcatatgcattctgcacttaccttgtcgatatctaaacttttcctaatatcggtggtgtgggaacaggtattagttcactcataattcactatgaaaccaaactccaaaaaatcatgtgcttcaagtatgaaaaattgtgtctattgtcactgtcatctattcttatttctttacttcatgtgttgattcgtagttattataatattggtgtctggtactctatctattgctgtgttaaaaatatttgtttgtaaactgtaacatgttggttacttgattatcaattccaatatcaaaccatggctgctcacaagcaatcaagttatttgagatgtcacactcttgtttatgctttcacagataaaatcttcctttttcatgctttacttgttacctgtattttactagccttggtatggatagtttatgaataatattggtgtctggtagtctatctattgctgtgttaaaaatatttgtttgtaaattgtaacatgttggttactcgattatcaattccaatatcaaaccatggctgctcacaagcaatcaaattatttgagatgtcacactcttgtttatgctttaacagataaaatctgcctttttcatgctttacttgttacctgtattttactagccttggtatgcatagtttatggtactctcaaaaccaagtaaccaacaaaacagtttagttagtttgagttatatagt

SEQ ID NO: 5175 - DNA, 794 bp, Glycine max
cttgtatgcctgcagccataccaacccgcgtacacgtgtcatgcaacagcgttacacaccacgtgtcaacatcacaacacgtgatacgtgtcaatgaagcaaaccaaaaacataatccacatcacctaaaaaaataaaaataaagttcgagtgatagaaatataagtagccaattcattgggctcacacataccaaactttaccttaccacatttcacccaattagtcaattcctgatttcccttacctttatatatttattatacataaagaaaaatattatactattattcattgataaatacaataactttaaatcatatttttgaaaatatcttatcataactcatcctaattttagaaataagatatgaaaggatccaatcaaagaaaatttgtatgcaaaacaagttaaaccttaaaatcagacaaggtagacaacttctaattctatctttttaacttttactttgaacccaattgcccactcccaatttaaagtcctttttccattatctgcggaaatatttatttaattataatgaatatcaatagagataattgaaaaagcataattacaaaaaagaagaaatctcctttacaccttgaccaccacaaccgatcacatcctatatagcccacacccgaacctccccacacactttccttcatttcaccccaaacctttttcgcttcctctctctttctctttctttttctcaattgctgcgaaagaaaaaagaaacggaatcgcattaccaaagacgaaaacgaaagaaagaaacgatgatgca

SEQ ID NO: 5176 - DNA, 814 bp, Glycine max
agtttattgctttctacacctccagagagctcttatttctacgtcaatgcacttcgtgcagttgctctctcttctgctgtttcaaggtctcttcatgaacttgcagtgaaggtgagtttaacttgggcatgcacatgtttaggcatcaaatacaaattctggttagtatacaagaatatagttctgtattcagtattttataacatcaaatatattttttaggttgttgcagccaacatggtgagggctgacaggtcactctctggcatgcatcttctatgtgcagttggaagatatcaagaagcatgttctcaggtcaggctgcatttataataaaaatttgagtgctaggaacacactccttctaaaacacattatcatttggttaatatttattgaaaactacaaaatcaggagagacaagttaaataataactgggacctgtgaaatttttttttttgtgatttctaatcaatttcaacaaatagtaaaaagtgaaaagtgtgttgaaaagagtgcgttgctagccatttctctaaaaaaagtgtactgtccctgctttcttgaattcagtatttcagtgcaaaatacattcaaacagatacacaatttatatgatctcttggctggtttcagtttgtcgattttactaagttgaaaacaagagcctgtttgcatgatggtctcttggtgattttcaagttcaaattatgtcaaggaaattttattttctccatttaggtgataactggattcatgatttagcatattttatctaacattaaaaaaaaaaaaaaactaatgggaaagagt

SEQ ID NO: 5177 - DNA, 730 bp, Glycine max
ttatgcctgcagactgtccagacaactataataaggagtaacttgaatccagtctggaatgaggaatacatgctgtctgttcccgagcattatggacagatgaaattggtatgatcaaattttgttgtgaaaaacagacactatcttctgttattctattatatagaggcacgtcattgaaagaaatagaaagagttcctccatcctcattcctaagcatccaataccttttaccttgcaaaacaagttccttgtattgcaagcaaagtcaccttctcttgcatcctttctcactattggaaattaaacatttctattctacaaacagtttataatttggttataacttacaatttgtcggaaacaagaatttgaatttacgataagaatgaattaagttatataaacagtatccaagtctaggcattcctcatttacctgcttttctattttggtatgataattaacaagtgattggaacatctccttctattagggatagaaatagaaatagaaagttttcactagattgattcacggcctcttgtttttcctgtgttccctttgtcagttctgtctatagtgagtgacctatgtataatgcatcttgctgtatgtgttgttcttctttctttctttccctattctctctgtgtgtgtctgtacatgggaaagaagataactgatttttggtttgagaatatgacacttcatcttatcaattgtctgt

SEQ ID NO: 5178 - DNA, 855 bp, Glycine max
agagtcttcaagtttcagcaaccgtctcctgtattcagcatgggctgggtgactaggaaccaggtccactttgtttccaatacacagtaatatctcaaagttctgaatatcagtgcgagatacccattctcgaagtgcagctagggaagatggctgcacataaagggaaaaaatttaagatacatacatatattatgcatactcaaggcacatagaaaacaagaaaatagttaaagaataattcttctgcacaagaaaatcaaaacaataagcagtgaatataaaacctccatcaaggattaaataactaacaacacaaacagaacaaatcaaaggagagtcaagtcaagcgaaggaactaacttcattcatgtcaaaaaccatcaccagtgcagtcattcgtcgaaacagggtcacgttggcagcagaaaaatcgtcgtgaagatgagccatccatagagaaacatcagcagtgtagtacttattgttgatagtccacctgttcattccacattcaaaaagaaattcaaaaaaggattcataataagcaaggataaaacaattcaaagtgaacatacatacccatggacattcacttgagaagccgaatcaaaagcatcatcaacatcaacagaggtcaatcctacactcaacatcagccaaatcaaattccagttccagcactgaataaataattccggaatctaaacagcataccaaagaattaattttacaagagttataagatacaacctaaaattaaagcttagagagaataagcgagagagagttacgggataggagggtgcgtttgccgacgttggaggatccgataatgaagattccgggtcggtt

SEQ ID NO: 5179 - DNA, 673 bp, Glycine max
aaaatgttctttgattgtcaaatgcaattgtgcatatacccccaccaatccaaacataaactccacaaagacttaatatggacatgccaaaagtatgtgatattttgaatttactcaaaaaatactcctcatgataattaacttaacaattttcaactcaaatataactaactcttcaaataatttttcaacttttgacttcttttcatatttataatatctgagattaaaattgcaattaagccttaaattttatattatgattaaaagagggctgcaccagaacttgaaaaatcttttgaatagataaacacgtttatatacaatgatctgttttcacctagaatggacagcagttaagccacgagaaagccacggaacataactacataagtgccaataggcagagattaagaagaaaaaaaacattattccatttccaattacttatcaaaagttcctatgggataaaaaaatttcagtagtaaaaagaaaaatccaaaataacttaaccaaatatgcaaaaatgaagaatgcagtattgcagttcttcctcttagctccaatactattctagctcatcctactccccatcatcactcctcatcatcgtcgtcctctactagtatcctcttgcatgcttcatagcacatgaaagaaattcctgcaggca

SEQ ID NO: 5180 - DNA, 779 bp, Glycine max
tccggccggaggttatgttccggctgatgtattaatgtctaagatcttacctgaaataaacaagtcaacaaattatggaggtctcatgttgtggtcaaggtactacgataaaattagtggatacagtacccgcattcaaaatcctctaagaaatgggacagcaaaccctctatgcacacggaaaagtcaagcatgtaggagccatgagggcggtttcgcggagcttcttggttacatgtccacgctcggtatcaaagtttatgaagacgacaacaatggaacacagtgctgtgagatcatatgtaggaacaactgttcctgcgacgcgtttgctcccttaaatcacattaacaatactagtactggatgtcagatatggctcaaaggaaccaaatttgttagagcttctggaaatatagctctgccaatcaacgtttctgttgcattgctggaacacaaaggtacatttaatttaatatatttctttttttttttggtcccctaaaggaactggttatggaacaaaaaatgcttactttttggctcctatggttataaatttttctcttttagttcgtatatttataaacattcatcaaagaatctagtttagttaattgaacaaaatatataaattattgtaaaattccaactttattttcaattcctatgaatcaaacagaatatttataaacaccatattttagtctttacatttatcacttttaatcttttttattccttatgcatatcattttaatttctacacacgttatctt

SEQ ID NO: 5181 - DNA, 701 bp, Glycine max
gcctgcagtgactgcttactgatccagcttcttgtaccaaattgttgtgaaaggccaactttttttccaccaaagtgcaagttcaatgctttaatatttggggtccctatactacctgccattgaattaatgacacaaataaccattatttttttggatacataaataaccatttagtggtcttaaaagaaactccatactctatcataattagcatggtaagtatctatatatgtcaagacaagaaatatctgctacaatctagaaaaaagaatagagttttactaatgcaatgtcaattacagctctgaaaaaagagagctaactcagctaaggctaagtcatggaatgaacacacactagcagaaagcaagataaagagattggatagtagtaacgattatttgacacacaatacacattatataaatcaaggcactttttcctcttcgaaggatactaaaaaatcagagagatgagagaattttgttgtcagggctaagttaatcccaaagtctttcaaatatatctccaagtcaacaatgaacgtgaacctaaccaagccaaacagtaaaaataaagcttcaaaggcaaatacaacctctgcatcaaaaaattattacaaagttacaacctgttatgctgtttatggaaatatttacattgaaaaaaaaaaaaggactgaaagacatcaaagtgaa

SEQ ID NO: 5182 - DNA, 785 bp, Glycine max
  misc_feature (774)..(774): n is a, c, g, or t
atatgggtttttttagccctgtctatgcggggataaaatatgatattttcttcatccaaaatgctatttacacctttggcagtttttaatttgaataaacaagatttcaaattgttcttattaagctttattctataagaaaccaaacacactctaaggttgaatgccatttaagccattaaaattcacacataatccaatgccatattagcgtcaagcaacttgcttttaggtaaataatgatgaatatatatatatatatatatatatatatatatatatatatatatatatactgaaaatggagaacaatcaaaagcaaccctgtatttcaattttattagaacttcgtcttacttttttccctgtttccacagttttaatcacttaaaagacttaatgtattcatgcttcaaatacaaagagattggggagaatgaagtggagatcgcatgtttttggaatcagtgaggaagtgcttagaggaggaaagttgagactggcattgtcaaaacacgccctcataacactgttaacagctgaagaagtgaagatttcaacaccatttgctgcccttggggaaagtattattcattcatttgaaaattggacagcttatacaaaattcaaaaatcgcttcatacttggcataaaaaattaattgtattggcttcaaagggtaaagttattgaaagatgcaatataagtgattgatattcttccatgaattttttttgctgaatatattcttccttagatattactgcaggtcgnctctagaggat

SEQ ID NO: 5183 - DNA, 721 bp, Glycine max
ctctcaagagtcaagactcaaccttttctcacacataattgttatgattacaaccacgaatgtcctatcataaacgaaaaccattcccaccacaagctcacccacttcacaaccacgaccaaatgcaatgccagtttaaggaacaacatcgaatgtcaacatgtcttggcccactcatggaaaatgaacagccaacaacatacttacatcaccataagcacagaaaggaagaagaggacagatagaaaacaacaacacctacaacacgaacaattaaataataatttcacttccatgcattgtgaatgcaaagattgttgcactgccgatcaatcagaaatcatcttaggtatgtcaacaatcagaatccatcttaggcatgaagtaattattacaaaaatcaacaaacttaccatatatgttaatatgtatgtgatcgaatgatttacatgcaataattacaacttacaagccacgaggcacaaaacacaatgaacaaagtagtagtaccagaatacctaccagccttgacaagtgcatcccagagctcttcagggagaatgcagccattgtgctccacatcaatagcctgaaatatgcggtaaagctccaactccttgtcatccatgtaccgcctaaagtcgcggtaatcgatccttccgtccctatcagcatcacacaccttgaaaagctcctttgcatacttatactcagggggaat

SEQ ID NO: 5184 - DNA, 702 bp, Glycine max
ctctcaagagtcaagactcaaccttttctcacacataattgttattaagattacaaccacgaatgtcctttcataaacaaaaacccttcccaccacaagctcacccgcttcacaaccacgaccaaatgcaatgcaagtttaaggaacaacatcgaatgtcaacatgtcttggcccactcatggaaaatgaacagccaacaacacacttacatcactataagcacagaaaggataaagaggacagatagcaaacaacaacacctacaacacaaacaattaaatgataatttaacttccatgcaccagtgttattaatggtggaacatggcggcaggctgaaattctgccatataaacatgccattgcaccttatggcgccgtcttggcaggattcccttcataaattggccatggcagttggcaaaaaattcaccatgccattccgccatgcccactatttaacaacactgtgcaccaccgatcaatcagaaatcatgttaggtatgtcgacaatcagaatccatcttgggtatgacccttaaagtgattattactaaaaatgaataaacttaccatatatggaaatatgtgattgaatgatttacatgcaataattacaacttacaagccataaatacctaccagccttgacaagagcatcccaaagctcttcaaggagaatgcaacattgtgctccacata

SEQ ID NO: 5185 - DNA, 773 bp, Glycine max
aaagggccttctgttgctgatactgttataggagagggaaacacaacagcatggaagatgtgtggccttgacaagagtacatgcttgactgtgatgtttgatctttcatcaagtgatcgttcaaatacccctggtgctgtcaacccacaattgtacctacagttccttacaaggttatttcacagaactttcactaatatgatctcatatatgtactatgttgtaccttgttgcacttctgcactgggtgttgaatattaatggtcatgttcgtattgcagttaccaggacccaagtggtcaatcagtgcttcgtgtcacaacagtaactagaagatgggtggatagttctgttagctctgaggtagtttcagccttttttatatctatggcggtggatgcctatttatttctcattgacttattgtcaaagaaatatttggaactcctacaattatcataatattaagaagctcgagtgtttatcctttttactctcttttattgctgtcaactgtcaagtctgattctcaagttatgtagtatacaaatatctatctaaatgcatttacatttatgtgtgttcattgtgtaaatctatgaaataaactgaaataaaataataaattagtctagtccttctagttacattatttgccatgtagggccattatttattgacaaggaaattgttaaattgataaatacaggatttttaattacttatataatttttctgttcaggaattggttcaaggatttgaccaagaaact

SEQ ID NO: 5186 - DNA, 702 bp, Glycine max
ccagccctcaccttgctgatgactgccctactcaggcaagctaaaatccttaacctctaaaaagttaattaaaagcctaataaataggatgatatcctgataaaatgatcaaattttattgaatgcttgtatgaatatgttttacattgaatgtttgtataaatagtttaactttaatgcacggttagcaaacttatcatacatgacaatatgtaattggatgaaagtgtatagatcctctaaactgcatagacaatttattcattaattaaactcttgagtataacttatttgttcaattatatatatgaagtgcagatatgagagtgtgcacttcaataggattgatggtctggctaaggtccttggaggagtccttgcttctgttggaggagcttcaatcattaccctttacaagggacctgttatttatactccacatttaggattacatcaggaacaatacttgtctacattgggagatgccacaggaaagaactggaacttgggtggcatatatctctttggtcactccttatgttggtctggttggattgtgatgcaagcattatgaaaaaaatacttggccccactcacagtttctgcatttacatgcttctttggtgttgtgcagtttttgacaaatgcagccttttttgagaaggattacaaagcctggcagttcaattctagtcgagagat

SEQ ID NO: 5187 - DNA, 810 bp, Glycine max
ggaactggattatgtaaagaaacacttatttaactctaaaggagctctcaacaactctatgtggaagcttctggatatgactccggaaacttctgatcatgttgatacgtcagaaaaatctgtgagctgtaatcttgttcttgaagaaacccctcagccttgtgcacaatctaatgtgctaactaaatcacctgtcaaacagttcactgaggctaaaacactaaaagcactgcttcttcatgacaaaagcttgcctatcacgttatttggaagagcaaggttcactctccaagatagtggcttttcacgagtaggatgtaacacattgcccgttaatgtccttacccaaacagtttcaaacgatgcacgacaagaattcttgaaagatgctgaggatgctgaagtgaaggagaggtcaccagaaaaaaagaatgatttacatcaagtggagaagaatcagcaaactgaggttcaggaggacacaagagttcataagggtgcctcttatctaaatatcggatcttcaggcttgagtggaactgtgagaaagttgtacgggtcaatgaatgttcctgtgcctcaacctcttccctccttaagggatcttataaattccagaaaacgtgccaagaggggaattaaatattaatcttgcttttattcagttatcttccatttatcatgcttggagatgttcatgcacatatgattcttaagattttacaagaattttttttgccttgctctttcccgaaccaccatctatgtcacgagtgcttgacaagaagcaggaaggtggaagggaataat

SEQ ID NO: 5188 - DNA, 811 bp, Glycine max
aactgaaattgagttagctaaaagggtgaaagacttctccttcaaggagacagggtactttttatttccgttttccctgtaaaagacagtggcttgcattcttggggatacattgatgtgttgttttcacacacatgcctcttccattcattgaattttttttaactacatgaggaattttgttttatgattttgccttatggttatttggggtataaggctatcaatatccagttatgattttataaacattttatttcatttgctgaagtccatgtaacttgtaaggcactttttagcaagtgcaatattggagagatgcacttgtgggtaaaaaggacttgtaccattattctaattttgatcttaaacaaaaaagaagtttaatatgtttatttgcaagtatgtgcaactgattataaacttgtggggacttctgtaacaatttttgtttaccaagttgtgtacgtttgatcctgacatgcattaacatgccttcattattatgtatttgcatctcattggcttttagcccttaggaatcattcaccactaacgtagaaatgctgctctttttttatcacctgtcttgtgcagtttattgggatatgtcaatatctttttgttatcgagaattattaaagtcggtataacataaatgtgttctaaaatctaacttgatcttggatgtttttaacccagcaccatatattactgtgtattatttggaaatagttactgtctctattcactggacttaatttatttggtatttgacacgggaatggaatggactaaacatttgcaatgg

SEQ ID NO: 5189 - DNA, 852 bp, Glycine max
cttgcatgcctgcagatacagatgcactgtgcacgaagagacctttttagtttttaatgggaatacttaagtcctgattaccgatagcaaggcagatatatgtgcattcattttacgaaatcaagatgcatatattgatatatgtatatatttcagctactagtatgcagcttcacacttaccactttgtgtatttcactatacattcacttaaaagagaatggccaaagaagatcagaaattttccataggaatcgaccttgatacaacgtattcatgtgttggattgtggctggagcaacacaatagagtagaaataatccacaaccaacaaggccacaaaaccacaccttttgttgctttcacagacagtaatcagagattgatcggtgatgctgctaaggatcaggctgtcatcaacccagaaaacactgtctttggtatattttcaatttagttattactgccttccttcttatgatatttctaaagacttttatgcccagatttcttttaacttttgcagatgcaaagaggttaattggtaggaaatacagtgatccaactattcaaaaagagaaaatattgtggccattcaaggttgttgctggtatcaatgacaaacccatgattgttgttaagtacaagggtcaggagaagcatctctgtgctgaggaaatatcatatatggtcctcacaaagatgctgaagattgcagaggtttatttggaaacacatgtgaagaatgttgttgtaaccgtacctgcttatttcaatgactcacagccaaaagccaccaagcatgacggtgccattgctggcctcaatgttatgaggataattaatgaacct

SEQ ID NO: 5190 - DNA, 833 bp, Glycine max
gtcatgcctgcacagtgcgtcaaaaacagatatcatatcaaattccagagtttcctcaactttctgaggagaggattttatgcattggttccaacagtaagcgacctgttctgaaatgggagaataatatggcatggcctggcaaacttactcttactgataaggcaatctattttgaggtattttatgattctatgtgtggttatataatatactatttcataagctttgggattttccctatagcaatacaaaaagacctgtagatttctctgtacaaagcacaattaccactctttataatttatatatattgcttatattgtatttaatatgtgtaagcatattttatgattgaggtgatgcaattaaaaaaattagtatatctgatttttatgttgtttcttggtgttatgatacataagattaaatttactattactggaatataggtgaatgcttaagcctataacaaccaaaaaatacatttgacttgttgcagctcttggcccataatttccaatcactgtcttgtcatgtaatctcttgttatgaaatctccttgacttgtcacatcttagtccctctgccccccttttgataaaagaaattgaagttctccttgtacagcatcaaaagaatcaaattcaagtagaattagtttctagttatgcatatgaagagttgaatgttttaagaatagggcttcaaaaaactccatgatcctgccagtttcaaactggtttaggaacaaagacaaccaatttgatcggtttctataaggctcgagggctggcttccaggtcacagccaagattcatggaattgaggct

SEQ ID NO: 5191 - DNA, 626 bp, Glycine max
  misc_feature (527)..(527): n is a, c, g, or t
aaaacacagtgcagttttgactgattttggtggtgttggtgatggaaaaacatctaacacaaaggcctttcaatatgctattagcaatctcagccactatgcatctgatggtggagctctccttgttgtgccaccagggaaatggttaacaggaagtttcaatctcaccagccatttcacactttttctccaaaaggaagctacaattcttggatctcaggtattttactccctcacccctcctcttttttttttttagattatcagactactttcatggtttcacgttgtagaacgtggtcaattatgttatgtttaatatgatatcttctaggcatgacacatgtgcaccctattatagtgtaaaaatacattactcaaagatacatagcagttatttcttgttacaatacattattagaatttggtcacctaacatcaagtcattagcctttcttttcgcctttttgcctaactatgatttcttggctgttagttcagctgcatttgacatcataatctatagntttttattttaatttattttatggtgatgccttttgacccatgacccacattaaccggatgaaatcaaagggcccacactttctgtgctaacatcatat

SEQ ID NO: 5192 - DNA, 683 bp, Glycine max
attccttaggagtttcaagaatgtgtttcatttcattaccattatcacctctttaacttaaaattttcaacatcatctttgtatgaggtggttgttccttatccttttgcctttcacatgcttcatctttacaaacatccatatttctggtaactttgtcatattcagcttgttttggaggtgttcatttttcatcctcctgcttttcaacttcttcatattcacatgaagtcagatatctagcaagtagcaacttaattgttatcatagtgcttgttggagccttctactatttgaaaatcagtttttcttagtgtgacttttaaatcatttgattggagcctccaagtttctaaacttgcaacttgattgagaaagtgtctgggtaaacaacttaatttaatgcttgtagaacagtttcttagtgctattttatatgattagataaaacgcataacatttgtagtaactgacttgtgatattctttcctgttaccataagtgtataacatgaaagcttgtgaatttgttgtgttatttgtagctgccatatcagaatactgtaattatataatattattatgttaaatcttattgcaggtctacactttccttgagaccactcttgtgactatatcattactgccacatttcaaaacatacttttctgacggagaaatttc

SEQ ID NO: 5193 - DNA, 674 bp, Glycine max
  misc_feature (648)..(648): n is a, c, g, or t
aggggataataagaataaaagaaaatactgtgcattaagattaatcatcaaggcaaatgaaaattcttgtcaaaccttgtgtaaattggatggacaaacaaagatagagaattgatcaaagtgagattagatatctggatgtgatcaaagaacataatcttgatcatgtaaggcctggtatttcatattagcacccttgtccataaggagcatcccttcctctgccatatgatggtagcacaggaagtgtgggccactttgattcatcttgtttatgtgggtccatggtcaaaaagcatcaacataaaataaattaaaataaaaaactatagattatgatgtcaaatgcagctgaactaacagccaagaaatcatagttaggcaaaaaggcgaaaagaaaggctaatgacttgatgttaggtgaccaaattctaataatgtattgtaacaagaaataactgctatgtatctttgagtaatgtatttttacactataatagggtgcacatgtgtcatgcctagaagatatcatattaaacataacataattgaccatgttctacaacgtgaaacccatgaaagtagtctgataatctaaaaaaaaaaaagaggaggggtgaggggagtaaatacctgagatccagaaangtaactttcttttggagaaaaagtgg

SEQ ID NO: 5194 - DNA, 830 bp, Glycine max
atcttaatcgttatattggcaccaagaagcctatatttgaccggtattcagtgctattcactgtttcaagtgcatggttatttgcactgtttctaacttcatgcactctgtataaccacaagccagaaagtacacagaatagttgccgcactgatcgtgctggacttatgagtgccgctacatggtaacattaactcaacactggtttttttctcaattaatgatctatcattttaatgcttttaaaggttaacatgattctctgttgtaaggaaaattgtagaaagtttgagattaagaaatgtgaagatagggccacatgaacaacaaatgtgttgtatgtatgtatgtatgaaaatttagttgtgcaaaaatgcttaatgattttgcctatagcaagaatttctaggaacatttggacgatttcatttccaaacagtggatttcaagtagtgttcgatcgatttcatatttaatcaatattcaattgattgatctgaggttatgaattgttcatataacataaccttacgagtcctactaccactcttgctctttttttatttgttctacatctacatgtatataagcctttaggggtttaagcagatgggcttaaagttcaccatttacgcagggtgtattttcctcgcttcttcccatgggggtctcctactttcaatgctggggaggcttttgctatgatggctgcttcttttgtttctctttttgaggtaggccttacactatacctcttaatagaatcccatgtctctcaatcataatgaaactgcaggtcgactgtatgaggctcaaccaagtacggaggt

SEQ ID NO: 5195 - DNA, 750 bp, Glycine max
tgcaaaaatggtaaaagcaacaggtcatgtgcataggagaggtaatttgagtcaactcagttggtgtttggaagaaagctagattatgcagtccaaggtgcaggagaatggttttacgtggttggatttgggggtgcaatttacatggagcaaatgtgggcattttacaatgtttgtatgtcttcaagttaaggttatatgtgaaattcaaagtctgtagccttgtcatgatctaggactaggaattccttgactggtcttagtagctacatgcattttatttgtacaccttgtacagaaactgtgttttgattatattttcttttggccattccaaaaaaaaaaaacaataagtgtaaggagaatcatagataacttgatctcttatgaagtgtaaggacccgagctcaacatggtttgatgataggagattcaagaaaccgtggcagtcatggaattttgtctctactaaaatatttgacttaatagcatatttcaatttgaaacaattttataaaaacgaaaaaccaaaataaactgaaactagaaactcaaaccctaaactggttgtagtcttaaaaaaaaaaatgaaaccaaaaacaggaaagcaccccgaacaggcctaaggaattggccacagtaacttatgtaaatatatattagttttccataattgagaaatccatgaatagctaagccagtccaggataattcagcatataaacattccagatccttccatattcacat

SEQ ID NO: 5196 - DNA, 749 bp, Glycine max
aagtcttgctcatccgcttatgtatcattggcatcccctagcatctcgtcacaatctgattgggaatgaacaaattaataagaatatatcaccaaatctaagccctagttccttctttcttctattccgaatattgctgtcttcaaggattttcaggataagcattaagatgatcttctggttaattttctgtacttacatgtctttatctaagtaattaattacttaattatctttatttccatatatataatgaattgaacctagctaagagatcagttaggcactttctctcccttttgcaaaagattcatcaacacaaatacacttgaatccaaaggtgaataaactatatatatatatatatatatatatatatatattaatgtgacagaacatatattgcataattatacatttattacatatattgtatacattttaaaaacctgattgcaaaaagagggttcagaagaagctatgccgcagtaaaaaaaaaaaaataagaagctatgccagttatgcacgctaattatttaagctttttgttaaccaaactgataactgtgtagctaaatgtagaggaaggcaacactaaatatagagaaaagctaaaaccaaattaaaaacttccactgtgtaatatccagattaattgggggatggtccccaaagatagatttctcttgtataaaaatatttcaagtcacgtatgttaactcatccagaaacatagaacataggtttta

SEQ ID NO: 5197 - DNA, 837 bp, Glycine max
ccctcgctgcctgcagagagatgaaatatatatgatgcacatttggaaaatatttgaattacatgtctgcattatgtgtatcaaaaatcttatttaccaaacatgattataaagaaagactattcctgaatcttgagtgattttgagaatcattctaaagtaaagaaaagcttaatggtatgagtatgacggtaactttaattataattgagcatataaggatatctacttgcagcaatcatggaatatcattacaagtctttaaaggatataatatatatctaaacatcactgagcagaagcagattccatactatcttataatagaggaacaacaaggaaaaattgtagcagtagtatcactttaagcagctgaaatgaatgaacaaatatcatattctcattgttcatccaatcatccaagaacttgaacagtcagcattcactactcctacagtatgaatgaaaaactcttaaaccagaagaaaactaaaaaaaagatgtacatggagaaacttttcttttttttcttttcttccccctgctgctatagttaaaaatattgagcaggtaaacatccttaattttctgagcaaatacaacctagcatctttctgaaaatccacaaaaactacaaataaaattcattgcacaactgatgataggaatgcttaaatagcatccttcccaccatttaatagttatgcacctcttgaatagtgggcaaagaaggtaaccatttttggcaccctttcaacccaaaacttctcctgacacctgcaattctacattggatttggagcctctttgatccgctaaacagcgattccaattctt

SEQ ID NO: 5198 - DNA, 767 bp, Glycine max
attgagatgggtgaattacctgaggccagacctcaagaagggtcaaataacaccacaagaagaaagcataattcaagagctgcatgctaggtggggaaacaggtaaaaaaaaaaaaaatgaattccaaatctctttgaacttgcatgtttttataataaatcttcgaagctaaatcaaaattaagcacttcaggtggtcaacaattgcaagaagcttgccaggaagaactgacaatgagataaagaattattggaggactcacttcaagaaaaagatgaaaactccatctgatgctgctgagaaggcgaaaatccactcctcgaggagacagcattttcagcagcaacaacagcagttgaagcagcagcagcaacaattccaattcaacttggacatgaaagggatcataaacttgcttgaggaaaatgaccatagagtgccttctatatctcaagaggcacaagaaatggccagcatgtacccaaacacttcagaacaccagggctacttctactcaatgttcaatgtcaatgacaatgacaataatgtctctgcacctgagtcctcaaatgaagaaattctatgggatggactgtggaacttggacgatgttctttgcaatttcaatgcagctagtgccacaagcaaagccagtttacataatttagtttctcctttctgttaaaaggttttatttagccttgaaaacagttaggaagaatactagtgtactaatgtcagtcacggcttgataaggctccaaaat

SEQ ID NO: 5199 - DNA, 797 bp, Glycine max
ttttgtttcttagtgatataggttgagtcaatgagtatatatttttgttaattacctcgaatagcttccatatggtgaataagcatgtttgttgccatataggatatggaaaagtatccatagacatccaatatgtattatacacctagtgagagagagaaacatagatattatgatgtgatatgaagagagagaaaaattatgggtgttggttaggtgtttaaaaagtgtgggtgcatgtattattactcattacaacatttgtcaactctcccatctagaggtgtattaagggtccatctttgtttgccatgtttcttaaggagtgatgaggtagaagtcaccaaactgatgaagttccttgtaagaggtaacttggccctgagggcaaatatttgatgagattattgtcatttaattgcttgaacaatgtgttttatactaccaggagtaggaagcaaaagataaggaatgaagtgtagttgatccaaagctccatatgatactaaacaagaagctatatggttaagtttgcagaatgttttcattttgggctgtattgaatattggatttcataaatttcatcctccagtatactctaggctattgcttcctatacttcctatttgccttccgggatgaccaattcagaatgtaaagttacttggattaagatcctctaccgttgttaaaaaactgcacgaatctggtactttgatttaatttattaaataataaatttacctgttaaaatttagttttataagttttaaggttaagattcataattgcacat

SEQ ID NO: 5200 - DNA, 782 bp, Glycine max
tactcactgatatttttgttgtgtttggtaaaattagcttataagctatctgaaaagctggaaagttataagttagaagctagttaaaggagcttataagcttcccgaatgccttaccaaacacaccgcactgttttaatttttaatagagtttaactttcatgtaccgagtgtaaatatttcgagcataaatcatgttagatgtgacttttaaaataatgactataaaactcgacaagtttactactatacatgactattttgtgtgtatagatgacagtgtaaaaatcttttagagaaaattaaattctttttaaaatgcaacatttgtttctttttaagtgattaaaagcatttaatagtgtgtattaaatgttaagtgtccttagagcactccttgataagacccaattttttattaagttgagggtgtatatgtagacatctaatataccatggtagtataccccattggtgctgtcttaattgtgtatctaaaatgaataatatgttaagttttatagtgttaaataatcagcaattagaaaagtgtgaaatgaagaaaaaaaaataataagtttgaaatgtttctagaggaaagaccaaaagcagaggttgcaatttgtgtaccttgaaagtgagtttccactttctgccaagctacaatgagtgaaaattgaaatctttccattccattccattttcattctgctctcagttttcctccaagcataccttaagtgtttgctttcggtgtttctgaactgaatattgattacctt

SEQ ID NO: 5201 - DNA, 766 bp, Glycine max
acctctaccgtactacatgcacccgcacgcacctccgccacagatgttcagcgatgagaaccccaatgcttgttccatcatgtgataatcagtgattaattttcgttttcagtgtactcttacacacggacggaatacgggatacggaatatgcacgcacgttgtaatttgtaaataaaaaaactggaaaaaaaaatcgacctgcgtgtaaaaattgaggggtggataatatatcaatattccgtgtaattgaaaattaatatagagaaattttatgatatggtagaattttgatataatataatgttttagagaatagagatagaggatggccggctggctggagaatcctgtccagaactcacatcacatgagttgttatttgttttgtttatttttttaatatcagaataaatggttactattgtttcaatgaatgtttcggaactggttctgaattgccgaggcattatgtgtgaaaagtgattggtttggttacttttttgtctcatttgagattttttttttctttctcgtttctgtttttgcttttggcaattttcatatgtggattgttaacctaacaattctgttattgtttttctttttcttttttcaaatataattcattacgcgttgaaaatcacatgcatttggatttggtggggagcgttgacaacatcttgccaacaaaaaaatttcgactttttaatagttgaaaattaaattaaattgaaatcgctgatatatatatatatatatggtt

SEQ ID NO: 5202 - DNA, 775 bp, Glycine max
aaccatatatatatcagcgatctaaattgaatttccatctattaaaaagtcgaatatttttctgttggaaagacgttgtcaacgctccccaccaaatccaaaagcatgtgattttcaacgcgtaattatatttgaaaaaagaaaaagaaaaacagtaacagaattggtaggtttacaatccacatatgaaaattcccttccatatgcacccaaaagcaaaaacagaaagaagaaaaagaaatctcaaataagacaaataagtaaccaaaccaatcacttttcacacgtactggtactgcttcgccaattcagaaccagtccccgaaacattttttaataagatcaacaaatttcattgaaataatagtaaaccatttattctgaaaaataaacaaaacaaagaacagctcatgtgatgtgagttctggacaggattctccagccagccggccattctctatctctattctctaaaacaacaacctacacatatgatatattattatatcaaaattctaccatattataaaaactctctatattaattaaattttaataacacggaatattatccacccctcaatttttacacgcacgtcaatttttttttatttacaaattacaccatgcgtattccgtatccgtatcccgtacgtgtgtaagtgtacaccgaaaattaatcaccgatcatcacatgattgaacatgcattggggttttcatcgctgaacatctgcggaggaggagcgtgcgggtgcatgtagtacggtagaggt

SEQ ID NO: 5203 - DNA, 743 bp, Glycine max
aaaagatacataatggcatagttctaatttgcagagaaaaacaaatctcctaaaattatttaaaaataaatgaataagtcataatccttttcatgtagcctagtcaactaagtaggacaacaatttgattgctattaaaaactatcaaacgttggaagggtactatactaccatcttatttaatttactccagctttcaatattgtttgatgatcaagagcctattacattatagcacatcctctaatatccttcccaatattctagtggaaatgtaaacaagtataaaatgtctggtacaacccagcaagatggtaaatgaacacaaaatgcacctatgcaaggaaattggataaataactggaaggtcaagcaggccttcgcaaagaaaattgattaacagaacatgaaacttaattgccaactgattttaagaaacttaagaataaaaatagaacaagaatatgagaaagtctgttcataggcaaatgcaataaatttaatatatcctgttttatggcaccgagaaaaatatctgtttacagcgaggtctccaatcattaaatactccaacaaatgaagcatttaaaacagcatgaagatattttgaaaagattaactgataatggactctacattttcaaggaatagtgttattcaataccatgaataaaacaatacatttcctttcccattcagattttcaagaatttcaatgctatgtattagttttgcataaaata

SEQ ID NO: 5204 - DNA, 830 bp, Glycine max
aaatttgatgctgttgcctgcaggtctgcaaaatagacaggttaaagaaattgagggtagttttgtaataacaatttaaaaataagagaggtggtgcaaaagtaaaagtttggggtgtatttggaaatttccatgacttatgagggagtgccccaatagggaagagaagaaggaattttggagtgcttgttaccaggatggacacaagtccaaatttattaaatcagcaatcaaaatggctcaacatagtaggaggttgctcaaacatcataaagtctatgttcatctaatgtgcatggttggctagagcatcaacacatctataccttcccgataaatatctgtgatttaaacgtgtcctgtattattgatcaaacaagaatagctcagacacattatataatacacaagcgcacacacacatttcaacttttttttgttttattgaaaataaaatccattaataatggtaagaacaaataataacaataatggttatcagagaaattaaactacaaataataaaatccattaataacggtgaacatttgagtaacaaaagaggcccgaacaaaacggtctaaaacaaaacaaaacaaaggcagggctacaaactcagccgagaactacaattaaactagtaaatttctttacattcagttatgggtttgcgcatgcatttccaaaattcttgggccatataaatcttctttaaaggtctcttgtgaagtgatcagacaaaacttactaatttctagaatgatgatgcagtttcttggtaaaaaggctattcaagaatcatgcccaatggccataaacatttttacaaa

SEQ ID NO: 5205 - DNA, 689 bp, Glycine max
atgtgactatcactcatccagaattaagttttgctgtcattaaggtttgccagttcatgttctcacctcttgaatctcactggacagcagtaaaaagaattctaaggtatcttaagggtgccttacattctggacttgttttgtatcctgcttcaactcatcaacctctttccattcaaggcttttgtgattctgactgggcttcagaccaagatgacaggagatctacttttggtggagcagtgtatgttggtccaaacttggttggtgtgttggtggtcccgaaaacataaagtagtctccaggtctagctcagaggcaggatacagaagtttagctgctgcacagctgatatcctttggattcagactctacttcaggaacttgcagttccttatactacacctcttgtgctctgtgacaattcaagtgctgttcaattagcacataatccagttctgcatgctagaactaaacacatggagtttgatgtgttttttgttagttaaaaagttctaactaagcagttagtagttcagcatattcctggaacagatcaatgggcagatttacttactaagcccttgtctcccactagatttgcttatgagttccaaactcaatgctgctgagcttcctttggtttcttagaccccattgagtttttttttttttttgggggggggggg

SEQ ID NO: 5206 - DNA, 694 bp, Glycine max
tcagttgtaactcaaagtacagctgtcatctaactaatgacaactgtcaactaactacagtctataaaactaacccgagttattcactcatatacacttaaccccccctcccccccccccccccaaaaaaaaaaaaaaactcaatgggtctaagaaaccaaaggaagctcagcagcattgagtttggaactcataagcaaatctagtgggagacaagggcttagtaagtaaatctgcccattgatctgttccaggaatatgctgaactactaactgcttagttagaactttttaactaacaaaaaacacatcaaactccatgtgtttagttctagcatgcagaactggattaggtgctaattgaacagcacttgaattgtcacagagcacaagaggtgtagtataaggaactgcaagttcctgaagtagagtctgaatccaaaggatatcagctgtgcagcagctaaacttctgtatcctgcctctgagctagacctggagactactttatgttttcgggaccaccaacacaccaaccaagtttggaccaacatacactgctccaccaaaagtagatctcctgtcatcttggtctgaagcccagtcagaatcacaaaacccttgaatggaaagaggttgatgagttgaagcaggatacaaaacaagtccagaatgtaaggcacccttaagatct

SEQ ID NO: 5207 - DNA, 814 bp, Glycine max
catgcctgcaggagaaaacccccctcgctcctctcctccctgcggttccctactgttccctctccacggttcgtcaggttcgttcccttcgctttcgatggcgacaccgaggccccgcaagttcaggaaccggaggttcaggttctggtaagactctctctaatgcttttatcttttatctttttttgttaattgtttattagctgaggaattggaaccgagttgaatttcgggttttatattttttttcttcgaattttagccttttttgcttgaagaggcgcattgaaatggttatagattttgtgctatgaaatcaagtagatgtgagagtgtgtggggtgtgttaagattctacataaattagacactcatggccaatgcactccttgtaatgacttgtgcaattgtttccccatgacatgtattttcgggtagaattgaacctagttcgttctcaattctaatagcaattatcaggattggtgtttcactttgataatccgtgtatttaaggttttcattaaaggattatgcagattacttaggtgaaactccaatcctgattagagaatacagcaaataaaacctaaggaccacatataagttttctctctatgataattcctcgggagattgaagttagggtgttaagtactaatgctggttttcaaaacaattttttaaataggtaagcaagtgatgtggggctagaatctagatagggtttagtgggttacttataccaaggagtatgaaaggattgagtgaaacatgactcatgagtcaagtgcagacaattgctggttcttct

SEQ ID NO: 5208 - DNA, 757 bp, Glycine max
tcttcagatacatacctcgtgaacagttgaccatcccagattttgtgtttcagttgagtctttatgttttcacacggtgccatctacattttcttttttgtaatgttattttgtacaactttttcattttcaatatacggcttctgaaaagtatttggaaataaagcagttttagcatgttaggaatgccctatgctagtattgttaggaaccaagagatgatgagatgaaaagaaagaatattattgatgggtaagggaagtacaagaactaagagaatgaatcctcctctaagggttgccccttcacaaagagcctagctcaatttacaaatttgatgaaaaatgaataatccttctttcccttaacacactctatttacaccaacagacctgcacatttcaccacagcctaataaccttctcacctttcccaaactaccccgttcctcctctttctataattaacttgcaactgtctggaacctgcattctcagtcctaacatatatcctcacaggaattctttgttatttgtgctgaaaatcctttttcttgctgtatctattttcttaatagcaaatttagttttagatcatagtgcttggcactaaattgtttcatacttttattcacacaggcatgacttggaagtgaatggagggacgggtctcattgtggatcccagaacaaaatatgtgtacaacagaccatgacacacatgaacttctatcattagttgataaaggaggaccattc

SEQ ID NO: 5209 - DNA, 845 bp, Glycine max
gaaacaaaaccacttgttcacattaaaagcaaatccaaaaccaccaaaataattataataagagtaataccctaaaattactgaacatcagtcaatttagcccgtatttttgtaatttgagggattcaagtgacatcatttgcgaacatcacaaaactaataatttcagagaaaaattgacaagatgttaaaattccaagtattaattaataatggataaaacctacatgcaatccttttagtgcttttgaagctattttccaaatagaaatagagtttggtaacctatgctaacctttattatgcagagtgcagccagattatcaatgagaaactccaattttaacttaggaacgataccaaaagcacttaagaaattgcatgtgcattttgtccataattaatttggtgtcgtgtattactctaagaaaaataaataaagactaagaaattgaagcattcattcatactttatccttgatcatcctccatataatcctcgtcatttcatcacctaaagagcaaagcaaagcaaagccaatcaaacaaacagtgatgaagcaaaacaagctaaaactactacttatgctggtgcagtgtgaagatgttaccgtccatttcgacgatgggattgagaacgggaactctgtcgaaggcggcgcgagcagcgtagcatcgaagcgagaggcgattggagaaggaaagcgtgtgggagcgaagaacgggtgcgtcgaagcgagttggaaggaggaggaagttagggtttctgagagaggttgaggagaacatggtggcgcttaatcgaaccgctgatactcttaccattcgctctcactcgcgcatgc

SEQ ID NO: 5210 - DNA, 689 bp, Glycine max
aagtgaagggtcgacacgtgttactagaggaagaagatagaaaaagagaggatagagtgttttttgtccattcatctttctctgggaggtgcagattcaaagtggaggtgcattattcaaatgcccattacaagttaacttattatttctggtttgggccttattcttattttatgtctttgtacctcaggtccgggaaagagaaccgagcgactaaaacggtgcgtttgggtcgggttgaacttcgaagtcttgatcgacgacgttgagcgttctctctcttcgttcagctcaatctggtaattcttccaaaccatcttcatcttcttcatcttcgtctatgaatcttcgattcactattctccattcccttcgttcactattttaaaaaaaataaatatatgaataaaattaatgatcgatatggtttgactctgttctgaccaccattgcttcttcagtttttattttgtttcctgccataatgtgtttctatacactaaatcaatcagtggtgatgaatttcctttattccatgctgatggtgaaatcaatgttttgaatttgacaaaataatattcattttcatttgttttgaatgtatgtgtgtatgctgaatgacatgattccttatgtgctatgtgttgtttaatgtgaacaatgtgtgcaaattctctgtgcttcatggc

SEQ ID NO: 5211 - DNA, 795 bp, Glycine max
tgcctgcagagcaacaaagtaaatgctcaaaaagactcgttcataaagcattaagctatgtagcatgtggctaaaacataaaaaagacggaaagggcagaagatagagacaacacacaatcaataacagataccacattctgtgaacttattcatcacttcttttattttttttgtgaaagaacattttcttctatagcagtgcccttcctgggaagcagacagacaagtctacatataccagcttatggtactgtaattcaagcaaaattttatactattcaaacaacttacgtagaaagctcataatgaatttttgcaagatcaaaatcatggtttatttaattctctgtttgaaacaattcatacaatttatagaaaattgtaggtaaaaaatgctcaagcatggcataacagtgcaaaaactcaagatagttgaatctaatgttaacagagatgtattgaaattcaagcagaacaactgattaaattaataccacattagcatccaaggggggtggatagttttcatttaaagtgtctatccaactgaagatcatgttatggtaaccatatggttttcctgccatgctcagtgcatactcccatgcagcagtctcattaaacctggcacgcaaagcagggtgcaatggaagcagagcaatatggggattggaatcatcattattcagttcaaagtcccaccactcttcccatggtatcacagcaattatatcttctccctgcaaacaaaaggtgaggaagaaaataaaatgccagcaacttgaccccaaat

SEQ ID NO: 5212 - DNA, 682 bp, Glycine max
aatgagtgctgcatgaagtgctgtctcggattctgcaaaaacactcccaccatgtttatctaagataagcattcccaccagagcggcataactttgtggcagctgaagaacagatgggctgcctcctcatccttttccctacgtaatgggcataatttgttagtgatgtccacattccttctagacaaattagatttagtgggcagtctatcacatattaatctccaagcgaaaaatgctgctttacttggtatttttagcttccatacgtcttgaaataccccatctatgttctcatcgcttgattccctgtcaagcagttgatatgcactgcttacagttaatatttgtgagagtaatgtggtagtaaaaatgagaatgttaagatggatttttgaccatacaagaaagaacaagatacaaaatgattgtatgtgagtagatattggtgaggctattgaggaaagattgtttggaaattggttaaaatggtttggatgtaggcttaagaaggttactagaagcaccaatgaggagagtatagtgcctgatctttagccttgttagaatgggtaaatggagactaagaaagacttcagaggaaattgtaaaagagatctcatggtaaataatattcccaagaatttggtttttaaccaaccctaatgacattatgtgatga

SEQ ID NO: 5213 - DNA, 714 bp, Glycine max
acccacaatagaatatgacaccccaatcagtaatccaccaaaatatgaagacagatagacaatggtcaatggggatcaaaagtgaatgccattgtaactataatacttatagttttgataataattaacacatttatcatgcacaaagaacattaatgtgcaagtatactaacataaacagaaaaccaacaaatattctataatattgtccagtttctataatcaagttagagaactgtacactgacaaatatatataaatagagtgagatgataaatactgataatcatatttgttttactattatttattttttcattcgaaaatcattttaaattatggtcgtacttgacattttatcatgatctttatgaaaaattatgaataaatatgattgatgctacctcaattatgttcttaaatactccaaaaaccttcaggttgctatcataattatagttgcaaattattgattaaaacctttttgatagaactcatgttaattctactaacagattggagtcctatattttcttctattcatttattatttagatggaaacatgaattttattaaataaatggaggagagaataagaaaagaatgtattaaaaaaatgagagagagagagagaaagacctgtagttcatgaccactagaggtgggaagagggtgtatagaagaagcagagtcaacttcatcagtgggaagag

SEQ ID NO: 5214 - DNA, 746 bp, Glycine max
gacatgttgagctattggaacgtgagctaatagaaaggggagaatcagcggtgtcctctgagtcagataatgtcagatatctccagatcatagcggagaaggacaagattctagaagagcttcagaaagaggttgtatggctggaacaagaatcatttagaaaagaatttgaaagtgctgtgattgagaaaggcacaatggaaagaacctttgagcatgagaaagataatcttatccagattgtgaaaggaaaagacaggagaatagatgaactcatgcagcaggtgacttcactggagcaacagttcactaactcattgaccaccttttcttcacagcttgctgagaaacaggctgaaattaacctcatccaggaagcttgttacaagatcacaacatctcagattctagctgcacttgaaattgaagagaagaagttgatggtagtggaacttgaggatgatattcatgctatacagcagaaactgaaattgcaggaggaaaagtggagcccatcagagcaacttgcattggatactgaagtagaattgggtgcaaaacagttaaaggcaatggagttgaatgatcaaatggagactactaagctaagaaaatcagatgctttgcttcagaaactacagatggagaatagaaatttacttgaaagtgccacgagactgtcatcggaaagggaaagcttgttggcaaaagttcagggattcagtgataaaatctgcgagttctct

SEQ ID NO: 5215 - DNA, 721 bp, Glycine max
tttattttgcaacttgaacgtgtttgtttcaggattggttctggtcctacttgagattcctgtctaactagaagggaaaccctctacttttgctttgcataatggcatgtgtctttgcccgtgacttttgttttctaagcaccacccagaatgtttctttatttctatcatgcatgcaattcattcagcagttttaacaatttaatgcctttgaatttgtcttttctttttattttttccggttgaataaagttaagttctaatccatggttccacacttttaataatttcgtttcggagtttatcacttcttgcatccgaggattgaggggcaatttgaaagcacccgtgtatgtgtatgcaatgtaagacaataggtttatacagtgtgctactaactacagagaattctgattcaaaagcatttgcaacccaagttcacaagaaattgacagatgactgaacattttgttgtcacaagattgttaataaatctaacgtgtgtgtatctttttaaagttaatgtgtcagttcatgttcacatagtggaccacatgttactgaataacgagaatctagatgtaagacggcggaacaaactaagaagatggtagtgctaattttgaatttccctgagttaaagaaaaacaatatttatgcagtttcctagttgaactgctcttatcttgcaacaattataagtgatcacagtttatttgaa

SEQ ID NO: 5216 - DNA, 810 bp, Glycine max
agtcttatagtttttgaataataattttagtctaaaatatcaaattattttataactaactgctgctttccagtaggtggtccttgacaaagagaaacaggttgccacagttgacagagaggttgacgatggtattgaaaccgtgtgtctaaacttaccagcagtaataacgtaagtttgattcttttaagtctgctgcatcaaccctatctatattcttaagaagctttgcccttttgcactttctctctttggtatatatgtatcacaccgcatggtggtggcctaagatggatttaatttccttttctctgtttttattttccactttcttttcatttcattcataacttaagttcaaattaactcattggatcgtgaagcaacctataatactgtctaaaccactcagtcagaaaagctttctctttgaatgatattgccagtttgttttgcttggtgtgattataaaaacaaaggaaaacatcatgttaaatgtataatgaagtactggattgtagttttcattttatttttacatcgttttgtgtgaggacatttaaaatcaaaagtgtggtagaatctgttttttaatgctatgtttttggtttaatagttacttgagattgaaggaaataatattttcatgactgctagtgagtgtaagcttgagtgaaaatgcattcagccataagagattttatatgcatgatggttacaaacctattaaatacaaaacaaaacttacaacagaaaaatgattaattctaactctacttcctaagttactatgtatctagattctaggct

SEQ ID NO: 5217 - DNA, 795 bp, Glycine max
aaagaaaataactgatttcaattaatataattattccatccacaatgaactaaaggagatatgtattttccatttaaatttaaagtatagtaaaagaaaaattatcgagattttagacttgaggttattttagcgatgtttaaatagatatattctcttaccaatttacacctatagtttgaggagtatgcccaaccaccattgccttagcaccaactgcttgcagtgtctcatcaagaatggaacatacctgggaatcaaatttagtttcaaaatatcaatacatatcagcttgaaacagaaatccattaaactgctaaggatcttagcaaacaaatcaagaaacatttgatatagcggcacaaaagtccccatgctagtttaaatgggttatgacattctttaggaacactaatgagaaaatgttgcggaaagatggcaccaagaagtttgttttcaggaaagactaattgtattttttgagatgttagatgaccattgcgggcatgaaaaaaacttgcaatttcttggacgcacaatgtaacgattcatgtttctctaagaaataccagatataaagctcatcagttaattaatgttttctattaccaggtaacttctttgttgcattatctctgttttgtcacactaagtcattgtttccaagtttgtttgtttgtttgtttagttatagaggtgctttgttctttttttttttttttttttttatgataggagttttgttcttttattttaactcaggggagtaccttttgtaggtttatccttatcctt

SEQ ID NO: 5218 - DNA, 830 bp, Glycine max
aaaattagcgtggaactatgggaaaatagtaaatccctttacagaattattgaaaaaaaaaggcaagtttcatagatctcaagcatcaagagacacaacaggcctttgaaactttacgatcagccaagacttccctgtcaatacttgccatgccaaatttctcaaaagacttaattgaggaataggatgcagccagaaaagggataagagaagtactatagcatgaaagctcacagaagtcagttcatgaaaaattgatggctaaagtgattacagtccaaaagtgacaacatattatacccattgaaggagttcaaaattcccaactgactgaacagagattaatgggtgaagaccaacacaaatggacctctaaattactaggctatgactttagaaatccactattatcctgaaaatgacaaccaggtagcagcttcactattatggaagatgaattaccctaccatctcaagagtccatttcatttaacgggaacaagtggaggaagttcagactaatctcaaaatacatcagttcataaaagatctgattgcacaaccccaagttcatccaggttatgctttgaagatggcaggttattttacaaggacaggttagttattccaaggacttctgctagaattcttttgctgctatcagaattcacaaatcagccataggacacttaggtctgttcagaaatcataacatgcaagagaatatctggggtggtttattggaaaggaacaaagaaggatatccagcagtttatagccaaatgtgaagtacacaagaaataagcatcaaacccggtacctcaccagtct

SEQ ID NO: 5219 - DNA, 699 bp, Glycine max
tggtattctaacatctggttaggagattcatgatctgtgcatccaatggcctcctatttaataaaatattttttaagtagtagggcatagctggatagtttataggtttcctggcgactcagtccttcttgttcactccaatctaaaattaaatttcatgtatataaagcatcagttaaatagtgtgcatgtcttgcagcaattttcattgcaaaaaatattgtttttctgagtcctgagtctctgatttagcagtttcagactacggtttggaggaagaagccagggaatatgtcaactcagttcatatagatgatgatccagtggacgagtatagtcttcctgagcaccagcagcagctacaagaagaacttgaaaccgaaattgtggaggaggaaactcccgtacaggaggcatctccgccaattcatagcattgcacacactgtccaagaaccccctgttgctcttgtggaagagtcctttgaggagcctcctaagaaaacatatgcatctattgtatgtaatactttctatacatgttcttttttttttggcagactacctttttttgtgtgtagttatgtactatccataaaaaaggtaccacatgactggagtaaccaatattcacttccaaatcaaaacaatcttttagttagtttttcatatttccataattctaatttcctgaaatcat

SEQ ID NO: 5220 - DNA, 623 bp, Glycine max
agttcatgaactgtagcttgctgtctttgcctttttcctaccttggtatccctatcggggcaaacccaaggcgtagagaaacctgggaccctatcattaggaagtgtgaggcaaaacttgcgaaatggaaacacaaacacatttccttgggagggagagtcacactgattaatgcaatcctaacagcgcttcatatatactttttttcttttttcagggttcccaactttgtagcagacaagctagtcaagattcagcgcaattttctttggggtggaggcctggagcaaaggaggatcgcttgggtaaggtgggatacgatctgtcttcctagggagagaggaggtttaggtgtaaaagacttgcggaaattcaatatagcattgcttggtaagtggagatgggagctgttccaccataatggacagttgtggactagaatattaaactcaaaatatgggggggggggaaatttagatgaaggaagaaacaacagcttacattcccattggtggaaaggacctaagcagctcaatcaatagaggagtcaatcaaataaaagagcaattcaatggaggggcgctgggagacatgaccaattttgggagaccaatgttaggggg

SEQ ID NO: 5221 - DNA, 703 bp, Glycine max
tgcctgcaggtcctaatgatgggtgaatttttgttcttatatagtatatagtaaatacgcattaggcaatgagtgcactcttaactgtcttcttaatgagaggaaaggatgctaacgttatgagtatacgtaatgatgattttagatgcattttgttatcattctccaagtaacttatacattcagcttaatttaattatttaagtaacagctaactggcagtatatatgtgtatatatatatatatatatatatatatatatatatatatattatagaagctaactagcagtattggtgagcatatcataggaattcaaaattaaacttcctgtgtggttcgtaaaatgaataaaagaaatttgaaatatcattaattcattttcgttaataagtttttttcaatttaaggtagtcactattttaatctactcaagtcgtaaaattggttttcttatttatgaaattctcttaataatatataataaattattgccttcaaaaaaattaattaaattattatgtagcgatgtgggttaagacccacgccatgatgaatcatactttaaaaaaagtaaaataaaaatgctactttagacttactatatataattgtataaacctttattttgtcacgtactctatgagtgatgtaaatataaaaagctttttacaatccataatagaattaatgggtttgtct

SEQ ID NO: 5222 - DNA, 718 bp, Glycine max
atttgtatgtgaatcccaatttgatgttttcttggccttcattccaatgtttcacatctacggacttctgttctttggattaggattgttgtgtgtttgtgttacaacaatttcgatgcagaaatatgacttaccagcagtgccaccaatgatccttgcactagtaaaacatgcaaggaaagctaggtgtgacttgtccagcctaagaagggtggggttaggtgctgcacctttgagcaaggaagtggcacaagagtttagaaggatgtttccatggattgaactgaggcaaggttatggcctaacagaaagtagtggtggagcaacattttttgcctcagataaagatactaatgctcatacagattcatgtgggaagctaattccaactatttgtgcaaaagttgtagatattgaaacggggaagcctttgcctcctcaaaaagagggtgaattatggttcaaaagtcctaccattatgaaaggatatctaggaaatttggaggcaacaagtgcaacaattgattcagaaggttggttgaggactggtgatcttggttacatagatgagaatggattagtttatatagtcgaacgtataaaggagctaatcaagtacaatggttatcaggtactcaaagtcatagcagttcagtttaaaattggaatatcagtaactgctctagttatatattcaaggtagcggtttttgtaaaat

SEQ ID NO: 5223 - DNA, 681 bp, Glycine max
atgccaaagtagcttgcaatggattaggcaatcctcttttctccatccccatctccaagtctttctcctcattattcatctctctcttcatttgacctacctcaacttcatactgagtgcacacagctacaaactctcctatcgccatgccacaagtccctgcaactaatcctgcaaaaccagcaagtagcatagccctttcatctttcttaacagctcctacacccatcatcaatgaagaaaccgaaaccaacccatcattggctcctaaaaccgctgcacgaagccactgtgccctttgtacatagtcaatgttgttggtatgatcttcagtaacttggatttgcttctgatcagtattttttgctggattgggaagtacttcttctgcatggctgagtgtactagtagccattttggtgacaacaacaaaggaaagagagaaagaaaatgaagacaaggataaagcaaagagttagcgaaggttcaaggctttttgacaagaaaagtgtggagattcagaggggtaaatagtgaaagattcgcttggttaggtattatcttcattcggccaaaagataaatttaaccgccgaggtttggctgtttgtgctttcgtgtgtggtatcagtgggacactccataaaaaagaaaaaccacaacaaacacgtagcggaaaatg

SEQ ID NO: 5224 - DNA, 820 bp, Glycine max
attaaaatcagtttggcatcaattttatgaatgaatcaatgaattgaagtttgagagaaaattatcttcctccctctctagctagtaccatgcattgagtttgtagtgtgtaacaaaaatattattcttctctctatctcattttccgctacgtgtttgttgtggtttttcttttttattgagtgtcccactgataccacacacgaaagcacaaacagccaaacctcggcggttaaatttatcttttggccgaatgaagataatacctaaacaagcgaatctttcactatttacccctctgaatctccacacttttcttgtcaaaaagccttgaaccttcgctaactctttgctttatccttgtcttcattttctttctctctttcctttgttgttgtcaccaaaatggctactagtacactcagccatgcagaagaagtacttcccaatccagcaaaaaatactgatcagaagcaaatccaagttactgaagatcataccaacaacattgactatgtacaaagggcacagtggcttcgtgcagcggttttaggagccaatgatgggttggtttcggtttcttcattgatgatgggtgtaggagctgttaagaaagatgaaagggctatgctacttgctggttttgcaggattagttgcagggacttgtggcatggcgataggagagtttgtagctgtgtgcactcagtatgaagttgaggtaggtcaaatgaagagagagatgaataatgaggagaaagacttggagatggggatggagaaaagaggattgcctaatccattgcaagctactttggcat

SEQ ID NO: 5225 - DNA, 737 bp, Glycine max
ggaaaagaaattgaagagctgtgccttgaccgtatcaggaagttagccgacaattgcactggcttgcaaggattcttggttttcaatgctgttggtggtggcactggttctggcttggggtcattgcttttggaacgtttgtctgtagattatgggaagaagtcaaagcttggcttcatcatttatccttctcctcaggtgtagtaaaatgaaatctgtttgtggtggagcatcaaacatttgttgactttacaacatgctatgaccttttattccaatccttcagtatgaagaaaatatctagtggagaatattccagtaatgagaaatgctacaccctttaacaatttttgtgacattttctctccaattgagtgaaattcatgtgagttctattcctcatttactggggatcctaatcccaaactagtgggatgtacataaatttcaatcaataaaaaagaatgttttaagaagagtgttcgagactatgttattagcactcctctgtattagtacatgatgaaaattgcatatacattgcagtaatgttaacttccaacatatgatgttaaattgctagagatgctttcacatatgttgctctacatactttagaatattcttggcttccttaattgtgcttcttattgattatccacatttctatattattataccaaattgtccgagtggaatgtccttactgtagtgttgttgttaacatgcaggtatct

SEQ ID NO: 5226 - DNA, 873 bp, Glycine max
agaactagctaatgccgccaaatttatagataaacttcctctggtcaacccttgaatctccatttaaatgtcaaaaatgcatagtgaattactgcttaacagtttgaaatgttctcaacctttgtcaggattatctttatctgcaatactatataagacttaagtaaaagaattcttacttctattattatactgaatgttccttttacctctgtaattttgtataataatgaacgtagggactagacacaatggttggtgagcatggggctcagctttctgggggtcaaaagcaaagagttgcaatagcaagagcaattttgaaagacccaagaatcctacttctggatgaagctacaagtgcccttgatgctgaatctgagaaaattgtacaggaggcattgaacagaataatgataaaccgaacaactgtcattgtagcccaccgcttaagtactataaggaatgctgatagcattgctgttatgcatcaaggaaaaatagttgaaagaggtaaacaggacatacagtaatagaaatctaatttctccatgactcatttctcaaatgtttatataccttattgcattattatatttttccatgatcaggttcacatgctgagcttacaagggatcctattggagcctatagtcagctcattagactgcaagaagttaaaaggtcaggacaaaatgttgcaaatgaaacagacaagctagaaggtactgcacattttggaagacagtcaagtcaaagatctttcttacaggctataagtcaaagatcatcagaagttggaagcagtggtcgtaactcattctcagaatcacatgcggttggcttcttggaacctgcaggcatgcaagactg

SEQ ID NO: 5227 - DNA, 752 bp, Glycine max
aggcaaaaagaacagagagatgaaagggtagaaaaatcaaagagtagtggaagcagcatttatctcatagttccaaagtaggtcaacacagaattggtgttttattaaaaacgatcaacaggcttgatttgttagatgtgagtcccatgcaaagacaaaagcaaaaaggtgtatagaaagaaatctattcaatcaatagagaagttaaagccggtattttttttttttttatcagcaagttaaagctggtataacaacatatgaatttcaatttgaatttttataaaaaagaaaacactgtaatttagatccggtagttattaacaattttgtttcctagtgtactattcacttttcatactgtgtgaccaccacattttccagtccccactagacttggcctctggtaaaacgggttaaaatcatttatacaattgccaaagacatttgacaacagctaagattattgcttctgcaacagaaaagagaaaacatttttgtgggtggaaaagtagatatacaaaacagaaaaagaagaaccggtgaaaggaattttgtgctttataaacaattatgtttccaaaagttacccgaattgatcttgagctagcagaagtgcattagcacatatttctgcaatcagtttttctcgatactccccgcttgaatggccaatgcatctttgcagaacacagcatccgtgttggtgagttgcaatgtcaacacaatactttgcagcagcaacaaatata

SEQ ID NO: 5228 - DNA, 725 bp, Glycine max
gaaatggaacaatatttagaacagtaagcaatttattggtcaatttaatactaaaattatgcacctaacctcaatttttttttacataaacacctacatttattttattgttttttttacaatacgtcatgagaatagaaatgaatattgaaagaagtatgttataataactgaaggcatttaacgtattcatccagttttatatatcaacgttttaaaaaaaatgcagaaaacaaataatacccaagaactagtataatttttgttctttttttttttatcttttggaagcgtttaagttttaacacttgtgattatgttattattatgtattgacgactgtctaaaaataatatgaccagagaaataaaataatatttttagaagagtatttaatttagtatttataatataacaatactccatcggtcattatttagcgatgaagttttcaagtgaaataacacagtacacatcgaaagagaatcaagatgcttacacaccatggacttgcacacaaaacagattccttctttttgttattttgaatgtgaaaaggctcaaaaaaagtgaatagaaatagaagagaaattataaaatatataaataaaatagaataaatgtagatgtgtatatataaaataaaatctagcgtggttagatgcataattttagtattaaaccgactaataaattagttactgctctaaatactgtttcggttc

SEQ ID NO: 5229 - DNA, 750 bp, Glycine max
atacaagaatgaccccgaaattttggtaatgacaaacttaatagcagcttatcaacggaatgaaatatcggaattcgagaaaatcctgaaggtacttttattgaatctgccatgagattatgctatgcactagtttggctttaaagtattcatcctcttttttctatttaatactttattttaaatgaatattgcataatgtactttccagagtaacagaagaaccatcatggatgatccatttatcagaaattacattgaggatctgctaaagaatattagaacccaagtcttgctgaagcttatcaaaccatatacaaggatcaggatcccttttatatctaaagtaattatgttcccactgccatcgaacaaattaaaggaatacccaagaaaaaattgtagagcttaagttgatgttactttttcatttgataataagatttatttgttaaattgaatagatacttatggttaatctaatactctttatataacacaaaacccatcaatttgcaggaacttaatgttcctgagcatgatgttgagcagctattggtgtcactgattttggataatagaatccaagggcatattgatcaagtgaaccggttcttagaacgctctgataggtcttgccgttatattttgatttgttaaattaaattcgtcatattcatctttcttttatataaaacataatatttactaacatattcacggtccaggtcgaaaggaatgaagaagtac

SEQ ID NO: 5230 - DNA, 819 bp, Glycine max
gcaagggggaaatgagtgataaataaatagatgagagaagaaaatgtactggaggcagaaaaagaaaaatatttttgagtattgaccacccctcttgatttttctgtattttacagaagtagataagataacaatcagatcaaaattaacagcataccttgaccctgttccctttcttgtgaagatgatttcgacgccaagtggtaatataaagtgtaagttggttgaataaagagcctgcaaattattgatactatattaacaaatgaactatggccaagtaaaattcatggtacaatttaagtacaaaataagggcaaaagttcctacctagtaggcctccaataaccccaataatagccattggaaataactccgcaaaggaataatcctcttgaccactaaaaataaaatcagtcaagaaaaggaaagaagaaaataaatatctcaatattcatctgacagtgaaaaagttaatagcttagatcttaactctgatatatcccaaattatgaatccaccggacccaaagtgtccacattttccactcttacaccaccccattgcagctcggaccacaacagccacaacagccgaagtgaagaagacacgccacatgagttgactcctccaccttcaagagcacaggcaacaaaatttaagtacaaaagcaataaacaaataccagtagaacagacaccactatctttactgcacatgcttctatgcaaacagaatctttgatcaagaaataaaaatccttaccaagatgtaacctcttccaaagcaaacaatacaccaccaactggagctctaaat

SEQ ID NO: 5231 - DNA, 874 bp, Glycine max
agacaggggagaaggtgaagggcgcgacccaaggtgctacagagactgtgaagaaaacccttggcttgggccagcatgatgaagacaatcgcaaaaattactagctactactataattaaagtgctttctcgtatggtttacgcaacatgacttttaaataatctgcttttccctacgctcctacgtaaggagtttactattattcgcagtttctattctctagctagtttcatcatgtatgttcaatgctatatatagccttgaattaatgtcaactatgttctaataatgctacacccttggtttgtatttttttttaggtacattattacactcatgtgtctcaggtatgctaaatcaaaatcaacataactcatacacttcaaatggaattataatttgccaactactagtactacataaaataatttcacaatataaagtatgaatttaattgaaatactcaccggaaactttggaagttattaactaaaatttattgaattttaaattagtttctaatactatccatatattaaaattaagctctaaaaagaagcaatacatctcattggtttaatgatggttggaaaacatatattattcctttacataaatatccccctaacatatgaaaaatatattattcttgtcataattaacacaaaccacagattgttttaacatgtagacaattcatatctgcaagctgaaagtttaaacaatagcagttgtgttgaaaattttcaaagcaagacacattcttttcattgttgaagaagaagaaaatatacctttttgaaaggtgtcacaccctaaggattgttgggatgttcaggctccccacttatgactaggcgtcctgcaggcatg

SEQ ID NO: 5232 - DNA, 817 bp, Glycine max
catgcctgcagtcttccctcctccttcttcctcggccgaagccgctgccatgggccgccgcaaacgacgtcgcaccaagagcgccaagaacaaggaggagatcgagaaccagaggatgacccacattgcagttgagcgcaatagaagaaaacagatgaatgagtacctcgccgtgcttagatccttgatgcctccttcttatgtacaaagggttagtctaatagtcttcatttgatcattacaagttaaggttttaaattgcaatcccagtcacacttctccatcccaatctttgatattgtgagaaattaagacaaatacaattgatacagcagtaattgcaattgtaatcatattatagttgccatgatctcaaaaaccttaacggtcaaaataacagtcactaaccgttttttaaaaccttaaaacacaaatacatgactttggtttgttttacaattgctttaaccttatgttaattatggtcacaatttttaatattacggaaaactacatataaatatagttgatatgttgtaattgggatcacacaattgcaatgaccccaaaatatttgatggtcaaagttgtagtgacagatcggtttttaaaaccttaaacacaagtacacaagattgattctttttacaattgttttgaccttaacttgtgttaatttccgaaaatgttaaaatactagctagccaactaaccgtaccacatgggtggttattcaaaaaaaaaaaaaaaaacacagggcgatcaagcatctattattgggggcgccattaacttcgtgaaggagctggagcagctt

SEQ ID NO: 5233 - DNA, 738 bp, Glycine max
tcaaaatgaattgcagaatgtgcagtcctaaatctcatccttaaaatttcttaaattatattttaaaagataaaatttccatttaataaattaaatcaatggactaggttgatgcagttctttataaaactgtagatgatcctaattctgtgttttacatacctggaaagttgatcttcaaattgcttgttagtattttaacttcaagggatgaatctgtgaagccatcaatatatacttggaacctcaagatgcatattacttactcatttgaagtatggtctcaatatttccacacattttatttcgtatcaattattatagtttctatattgaattaattgttgaagtacatgccacaaccatcatgggtgcttatatttccttgagctattcaattcattgaatcaagtttgagccagatatttcgtttttactttcaccacaaaactggtgttttataccttacctctgttcaagtcctctcttttcatactccatagtaaatacatgttaaagtttctttaagctttttgccaccttctcaagcttgtgaagcatgtatgtctcttaaattttaaacctttgggggacagggtaacttatgcttttgcaattctgttaatagtaaatcttataacattaagagaggatttctagtaatctagtttaaagttggtcttagccattattcaatgcatttgcaggtcgactctactagatacgtcgggtgacgag

SEQ ID NO: 5234 - DNA, 776 bp, Glycine max
gacttcagtagcatccagaggaggtaggggctctgaaggaggctgttgtcctcatgatagttgtagaaggggcaagaaatagtgtaaggttccttgataagagaggctgtggtgtagccacctcaactagcccaggaagaggaggaataggcaaagtagaagacataaagaagagaataatatcaaaggaaatactggctgatatgaggtgttgagtaggaaaaacaacaacataaacctttagggacagtgaaacacatttaaggtatacccccatggggcaataattttgtcaaaacctgaccaggagtgagattaatgaatatggacagaacaagctgactcaaggacacaacagggaagagaatacaagcgttgaagaggaaaaacagagtgaagaacctagtatcaattatcaaacacaaaagggggcattcagttaatcaagtattgagcagtaaggacagagacaccaaaatgtgaattactgagagaaaacaaaagcaaaaaggagggagaaaccaagaagtgaattacagggacgacaataaatataaatacataatcaactaatagagaaaagaaggatgggaagtgtcaatcccttgagattgagtttgggaatcatggctaaagtgacagtaggtaaaaaatcggaaagataaagtttgaagaaaaggtctttgttgccagatgaacaaaaatcatagactcaagtaacaaatgagatcaagtgagatagattggcaaaaaaattttacaatattcgcaaaaga

SEQ ID NO: 5235 - DNA, 759 bp, Glycine max
aattcaaagagacagtaaataattagaatatgttcccccagtttttcaagacagctcctttcagaaagccttgttggttatcaatacagtaccattgatgataacagtatcatattaaagtcacttttagtatttgggccttctttagcagcattcacactcttgttcgactaaaactagatgaaaaaagtcaaattgagcagagcagcactaaggtcgatgtccagtgtagtaggccttttcctcccaatttcagcatatcacagtgtccataaaaaatttctcattagtggcacaagcttttgcagtgcacacatacaatataataattgaaacagccccgcattccgatggagctagagtactattcacaaataacatagcaaaaccacttaactttagttcaatttttcaacatgtgtggatcccagcaccagcctatgtccaacgttcaaaaagccattcaaacttgcacgagtaaattacggccatttgtacacctttttctctgtaaaaaaaatcagtatcctaaaatccttcctccaaacacttgtatcatcttctagcttctaatttctaaccatgcaaatgcagctattcaccatcttcaaactccttatactaacactattatttcagctacaagtcactcccactctcacactctccccttgcaaaacctcatgtggcaacattcctataaattacccctttggcctagaagatggatgtggtgcaccccagttcagacacatgcta

SEQ ID NO: 5236 - DNA, 718 bp, Glycine max
atatatacaattaaattgttgagaaggataagcattaattcatagtgtaataactgaacaatagttgtacattgtaacagaccatagacattctaggacctccaactaatatctcaggctttgtggttgagttggttcttaacaagacatttttagcatagggaattggagcctctttggttgttaacaaggctcatcaagctctgatatcttgtttcataacaagatatcacacttggagcctatttggcaaagtgatctggagttgactcttgccttttccacttagaatattaaatataatttatagcttaggaaatggtgtgccagttctttgtccttttttcactctcagagggtcttgatgtgagaagttgtgttaattaaaactatttttggacccaattcttatgttattccttggttagggctgagcttgcattgaaaatatgtagttagcttacctgtcctaaatccacagcagggtttagactctgtccacaatcgtaaataatatctgtttgcaaaaatctggtttcgccattcagaagatctatttccacctgagaaatcatttccactatttagcatggcagtataagataagttggtttagttacttcagtaacatggcttgtctgaaaatatgacataagcacttaacattcaactttgatttgagatatgcatagaaaaaaaaaaccatcttacctcactt

SEQ ID NO: 5237 - DNA, 778 bp, Glycine max
caaatagttgctccactagtgctcggctagatttgttgttggctctgctggatgatgagtatttctcagaacaatggtctttcatcgtcaactatgtgattggccaaagtcattctgagctccaaccagggttactggatgctgaccatgcatcaacattggccacgctcctggaaaaagcaagggatgatagaatgaagaggaaggtgaaagacgattccagtcatagaatgggctgtaatgctaaagattggcatcatgaatatctcgaatcatctgctattgctgtttctcgatctctgcccccttttagcacttctcatgtgcagtttatatggtatgttaattcaaatttttcatggctagatgatttaatgtcttgcattatttataaattctcctgtttataactaaacatgtcaataacatgattgttgcattcttctctttttttggttttaaatccaaagttcatattattggtccctgaattatgtaggaatttttaaataggtccttgtactttaaaagattgtgattgggtctctgggctagggttctgtcaaagttagaaagaatactcttgatacctatttaaatgtagagataagagacctatttgaaaattcccaaatacttcaggaacctgctgaatattaaactagtgacttagtctctgaactatttgggaattttcaaacctactttttcttaatatttattaacaagaaaaatgctaattcagacagtctattttaaacatcatcatgactatgaa

SEQ ID NO: 5238 - DNA, 621 bp, Glycine max
tactgttatccgaggcagaaaagacaattttctggggagaattttcaagattagtagagaaagttgaactgtctgaggtatgaacaccaactccatcatgttcccttgaatccatgttattatcttttaccaacctagaggcacccctttttgtctccaaaaattgcttcactgaaaagtcaaccttactgcccttggccgaatctgctatgaaatttttggaaccgacactctccaactccaacctgtcaccttttccaacatctttcttctcagacaaactacgaacatcatttctatctgccccatgttcaaaaacattatcatcagagccgtttctttcagagaccaaaccaccctttacattattgtgcatcccctttttcttaccgtgcccaacttcatcaacaacaataggaatatgcactttttgcaccgtagcaatgaaagcagaggagttagaaaaccctgaaacagtacctgttggtggattccgaacagtgaagtactttggtgttgaatgtaatgaaagtctaacattatcatacttttggggcactgaagaccatggggcattttccattttcatatggaaccaattttgactgacaccaaaaaaag

SEQ ID NO: 5239 - DNA, 784 bp, Glycine max
agcccgatgttcagtgtatttgccattatattgatagatttccaaatcaccccaaggagttggtgtcacttcttcagttaaatcaaaccatcttggtgtgaagctatgccctttctcctctcggcttctcttttcagcacgctgcctctcctccaaactgaaaggaaacaaaacaaagataaataccctgggaaacaacctcacagcatctctctgatgattgttgaaacttaagcccatttctatttgagagaggggttaacagtggcagagaagactaacaaaatctcagtagtatataaaatggttctaatttctagtcactgccactcccttgagcatgagagagagagagagagagagatcatcatatcaatacagaaggcaacagcatggtcattcaaaaccgaaccccgacctactcaagaggaatttccatccaccccagcaaaattatttaaatggatatcatgaataaataaagatgatatagatcatgttgaactgttgtctgttactcaattttacattagtattagtgcttctaaaatgctatgctaaatttttgggcacaaggggacaggagaaacaaaagaaagggtcagtaacctgctcttttctgccccagattttgacagatcgcccatctcgagtgcatatctatctgggcgtagacgagaatctgacgccaacaactttttaggggcagtgtcaaagctgtttattttatgagcaaaatgtgtatactgaaatttgtcattctggggaacatcagcaacatgcc

SEQ ID NO: 5240 - DNA, 769 bp, Glycine max
ctaaggccaaaatgtaatgctggaaaccaagaactattgtctccactgttaacagttcaaaacattctcattaaaaccaaaatgtgaacaacatacacaaaaaaaagttcaatcttttcatgaagctgaaaatgcagttgaggaagtgggcataccccaggaagggtttgagtctatacagtactctaagccttgaagttgatccattggtgggtggcttatctcctctggctttggagctgccatgattcctttgaactctacttttacctacaaatcttaatgcttatgaaggacaaacttgagagtgtgagaggaagaaaggtagatagaaagccagaatatttggtctagtgtgtgagaaaactgagagagggagagttagtcaatgtatgattgaaaaggagaaaggaaagaccaatggacggatggaatcaagagagagagagaaggagaattattatttttttagaggaagaaatatgtgagaatgcacagttgaagagaaatggtgtgagaacagaacagggcaacaaaacaaccgagaaagagaaattgcactgtgtagtgtgtagttcaacacttacacaacctcaatctttctctccttttttctcctttgcttttattttattttataaattataaaacgttaaaggtgccgttaacttttccgtatccccaaagtggcccttgaggaacttccaagttctgaattaaaatgttaccgttgcctttcagttcttattaaacttttacaattcagttt

SEQ ID NO: 5241 - DNA, 745 bp, Glycine max
aaacaaagtaaaagggttgctgggaaaataagctgagggggcgtgctgaattttttttcttccaacatgacttgttaatttgcaatattaaaatggaaacacatatggatcattatattcagtatctttattagataaagatgaggaaaatgtttataaaaaattcaattaatagcgttgttagcaaagaataacagttaaagaaattcattttttaagacacatccacatcaaattgaattcataggaatgtcaaaaacaagagacagatctttctgtcgatatgaccaattctggtaattaaaaatactagtttctatctccatgggtcgcatagtactatgttcatactggcagcagcttgatcctagccacaaggtgcttttagggggttaatttcaaacactgcaagtaaagtccaacctcataagagattgattttcatcttaaacttcattgcgttattttattatttcatccaaaaatgctataagtttggattcttgtttgactttggggacccaacccaagactcattcatctacaatcatacattcaatactgacctctcttctcagttctcatgactatgcaaccatcctcatcttcctttggttatggattcacctacgatgtgttccttagcttcagaggggaagatactcgttacggtttcactggcaatctctacaaagctctttatgacaagggaattcacaccttcatcgatgaggagctgcaggca

SEQ ID NO: 5242 - DNA, 774 bp, Glycine max
  misc_feature (764)..(764): n is a, c, g, or t
aaggcatatcagaaatgctcattccaaataatatgattgtcatgattgaggcatgcaatttagtggattaatgctccaatccaacgtcacagttgagttatatcaactttagttttgaacgtatacgcccaacaacgaaacttaattaaatccatcgattgttaaaaaaaaaaaaaaaaaagagaccctggttggatgaaatatactgctatttcttattagtcataagttaagaccaaacaaccacttccgtatacatcatgttcatgagtatgtttgtatatatatatatattagtagtttcaaaccatgatctttgtgcagttaagtaaaatctttgaaagaaggataaatttctcactaaataattaattgaaagatgatgattttacacttttagtgttttattaagtaggagtctttgtgagagggattgagacaaatttgtctttatttctatttcactcaaaaaattgataagataatttatttaatttcaaagtcaaatcgatcgattaaattccgattatttatgagataacatgatgtcaacccgataaatttattttaatacaaagttaatccattgaccaaactcttttaacgtgagaatattccaaatgatactccgtttgatatagagcattgtaaacatataaaggaccctcgtgcaccacagtagctatttgatgctagatggtaccagcaaattaaccacacacatattgcattgtaagattgactgcaggtcgatccagaggatncccccgggta

SEQ ID NO: 5243 - DNA, 729 bp, Glycine max
gcagactgtcttgacaaggaaaaatactatcactggaattgaatatagaaatgaccctaccatttttggttgggaattgattaatgaacctcgttgcatgtctgatccttcaggtgacactctacaagtaagtcctttacctgtgctttaacccctttgaaatatttatggaagaagtatgctagcaatatcaataactttcaaaaactacaataatggctgagtttgatacgaaggcttcgatatccttagtttcttaccttgcctttacaagtggctgattccacaacttgaacctgtgacttcctagtggcatggcagcaattctaatagttgcgtcaaggcttcctttcaaattcatagaaaaaggaaggaggcagtgttcattctgttttatttacatatgtatacgccttacataattgtgataaaattgcagggatggatagacgaaatgtcaacttttgtcaaaatgattgacaagaaccatctgttgactgtgggtctcgaaggtttttatggtccaaatgatccaaaaagttcaactgtcaaccctgagctttgggcatccagacttgggtctgattttattcggaactccaaaatatcaaatattgatttcgcctctgttcacatctatcctgaccattggtaagaattccatgaatgctatgttctttagttttgggttttgctaagtgttactcaaaaaatggactaaagagaaat

SEQ ID NO: 5244 - DNA, 695 bp, Glycine max
  misc_feature (669)..(669): n is a, c, g, or t
  misc_feature (677)..(677): n is a, c, g, or t
ttgtcaagcctgcatgcctgcagcggatgcgatttcattatcaaataaagcccttctccatgagagattccattcccatgaggattcattgaaatttcccacctgctggataagttgatgctgctgaagagatatcctatacagccttgggtattttatctgtagagcctctccatgtccagcccaagaatcctcccagaatttaattttatccccacatcccaccctccaagtaatgccatcttggaggataggattcagctgttggtcttgtgtaacctccattatatctttccaccaggcggactcgttattccctctcctgccttccaccaatgacctccaaccaccatacttggaatccaatatcttggaccatagcttgttgctttgctggagcatgtcccacctccatttaccgagaagagccttattgaaagcccttatgtcttttataccaaggccccctctttcctttgggaggcaaactgttttccagttcacccaaggtatctttcgctgctccaaactacctccccataagaatttacgctggattcggatcagcttctctgctactttctcgggcaaccctgaaaaaagaccgaaaatagatagggatggaggataaggtggaatggataagggcactctccccccatatgatangtgccttntgtttccaccttgctaat

SEQ ID NO: 5245 - DNA, 716 bp, Glycine max
tcagtttgtcaggaatagcttaaattctaggaaattattgctttttcaaaaaaaatctcagaaaactggcaaaaacagccggttatttcttcaaaagaactaagcacacacttaaatgagaagggaaatatggaggaatacactttacagacacaagttttgcttcattgtctggctgctagccttcactgcaaaatttgcacagtagctacttggttctgaaatatctgcaatatagggagttagaagcttgaaaacgtacaccctaaaattatacactcgcagaggcagagctttgttttctgaacattgccaattgctcaactccactccaccaacaaaaaattcctcctttaggtaattatatattataacatccctaagttatagtagcttttgctctcagcctttatcattaaaatattttcctcaatggcaaccttttatctgttttttgttgtttttatttatcttgcatctggatagcatgagtattgtttttctcatatgatgtatgtatgattattctgatatcaagataacgagtattgtaattgctgatatatgtttagttcctactactgcacatggtttgtctgtatataatttaaaacttggtatttgtttcattattttatcttcttcagcttctttgctatggaagactcggattcagttgctacactgatagattctactacttctaagatacaaca

SEQ ID NO: 5246 - DNA, 747 bp, Glycine max
gtgcacagcacatactctatttcaaagaactcttattctcaagacttgcaccttaagtttccaaacttatatgccatatgaaaaggctaatatatgcaaacattaaaattgatcaagtcctgggctttcaacattttgacaagatatagaaagcaaagaatataaaataaaaaaaccttgcctctcctttcatttcctttaaacttgtcgacacatcttagtccatggcatgtaggaaggaaatgaatgcagaggaaaaacctattaaacacacaaaaatgtcccctgctggagtacatcagcaaagcttaaactaggtttacactttttgagtttcattgaattttccatgaaattcaggactactccaatcaactaagttggtttacactgataattcacaattgctcatcgggtgtacccataaaactcaatgccacacataatttgtttttatcaattcactacaacaaattatccagatatatcattagcctttcaaaacacccattagttactatttaattcatttgtgatttgtggaaaggacactggtgcagtgaaacagacacatcaatcacataatgaaatagcacacaaggataaaaatgatattttgaatcagagccatgtatgtgtaattcctttctaagatcgaaatcctaccaccaagaacatccacagaagtaactttagcttcatgcccagatagtgtcttcacaggcttaaagtcacggcctgaccaaa

SEQ ID NO: 5247 - DNA, 750 bp, Glycine max
ccccgtttttctttaaaagccacctggagaacttcctcttcgtttcgctgattttggggttttgcatcggaatgaggctagtggcgccctgagtggattaacacgtgttaggagattccagcaggtaaatctttcttctgtacttaacacacatgatcagcaagataaaagttttgatgaaagggtacattttttattgggttatatttccaaataaaattaattttctgtttagtatattaaaccaggagttgcattctttttcatgtcaaggtatactaaggcaggaagacatacattttaatactttatcatggcaagattctttgatctttcaattttataggcttacacagcaaatactaatctcatcagggtatttgaaattttgaacacatgtttgaatctcgttatttttctgttgcaatactggagtagtaaatgttttttaaagtaggttggggattagtgtttgtgaatagacacagatacaggagattggcatcctcatcttaaaaataaaacacctgggatggtgtttatatacagttattttaagtgtagctaaaatgtcatttttttcctggtgatggtttttgttcattttataaatatgatacaattacaacccaaagaacattgcaattcagttatctggatcattcacattatcttcaatttctattttctgtactgattgagtataatggcatttgctttaaatgttgctcaggacgatgcacatatttt

SEQ ID NO: 5248 - DNA, 703 bp, Glycine max
aacttcctcttcgctttgctgattttggggttttgcatcggaatgaggctagtggtgccctgagtggattaacacgtgttaggagatttcagcaggtaaatctttgtgctgtactttacacacaggatatactttttattgggttatatttccaaataaaattaatttgatgtttagtatattaaaccaggagtcacattctttctcatgtcaaggtacactgaggctggaaggcatacattttttatactttatgatagcgagattatttgattctttcaattttgtaggctcacacggtgaatactaatctcatctgggtatttgaaattttgaataaatgtttgaatctcattatttttctgttgcaatactggagtagaaaatgtttttttaaacaggttggggattagtgtttgtggatagacacagatacaggagtttggcctgctcatcaataaaaatgaaacacctgggattgtgtttatatacagttataatagtgtagctaaaatgtcattatttttcctggtgatggttttttgttcattctatataaacaatacaattaaaactcaaagaacattgcaattcagttatctggatcattcaccttatctttaatttctattttctgtttgagtatcatactactattaatggcatttgctttaaatgttgctcaggatgatgcacatatttt

SEQ ID NO: 5249 - DNA, 734 bp, Glycine max
aaaaatgaaaaattagtattgcaaaagaaatggcgaaactgcatgaaatgaagttgtgttttagactgcctatgatcctttcccttttcttatgaaacttattcctaaaataaggactagatgatgggatctaattggcactctcatattggtgctacggaagagagagaatttcaaattagcattcattgtgtgaatttcatttactgatatacccttttctatcttcgtgataactgtgagataaatagataaaatgtgataagtccagcaacctaaaactagcttatgcaatttttaatgctctgcttgctacttttggcaaagcaaaagtgcatgaacagaagggatctaacacaaggatgcaaatatactggtagtaactaggaacaaatagggtatcttgcattcttcttctcatgcacaaatttgattcacagttaagtatagctgcactagcagaatatagtagaaagcattgttgaagatgaatatgaagtggtgaaattttagatatcacagatctaagcacaataatgaaaaacaaacagcattacaaatatattatacaataaatacaacaatagcatactaagtttctggaaacaagattttgcagttcattacttaaatacaaaacattgtaaactcctatattaaagaaattatctcgcatttgtagctgccaacaatggtttcttctctgatcagaagcgtgcagagcatacaagcaa

SEQ ID NO: 5250 - DNA, 734 bp, Glycine max
agtatatattcaagactcaaattgacaaacagtttataaaatgaaaggttttgaagttgtggtaaagaaagacgggtcggtggttggctatattatatgtgagctagtggaatgatacgtaagaaactatgtttaactccaatgcccccacaatctgagtgagttcaatacacctcccaattagagttaggaggttcaggcaaaaatggtgatcttgggagtctaagagtgaggaagagagacaaagagggtgtgtgcttatgcgttggagtcggaaggacactcttccaattcagaagatttgatttgaagagtgtatgtttatgcaaccaagaaagatggtgtgggggatacataactgatgggagtgtgaggatggtgctagaattaacatttacttgatgcaaagtgatgagatattgagattcaaggagtttatcacactactagaataatggttttggcatttttgtaagaaaaatgttatgtgtacaaaattaatgtaataaattacataaataagagagaaataagtataaacataataaataatatatttgaaagaaaaaaaaaacataaaatgttgtgatataaaatattgtataaattgttatatcaacatcataattcttttggcaatggatgtagaagagagttatgaagttgaaagaatgataggatgtcaacgaccctacaccacgcaatcatgtctgtgttagcaggttgtgcaggca

SEQ ID NO: 5251 - DNA, 749 bp, Glycine max
aagaggaagaaacatccaacatataaaaatcaaactaagaaaagatgaatccgtttactaaacacttattttaacaaataattttaaacaaaaactcgtacttaatctttcccaatttctctttctcacatcataagcttagatgcacacaagaaaacaaatattatcacattttctattcccttcaaagtcacaataaataaacttcaagtttcaagggcagaggattcagcgcagtcatatttttgcatgcatttatgcattcaacacatttatatccgttagatgaaagatcatcggatggatgagatttcttatgtttattgagcgaaataaaatatgagccgtccaattgtttaacgcgtgaatatcttgaaagtgaatgcattaattaattgaaaagcaaatgcagtgggtcacttaaattttcaatgctaccttgtcacttatttcagaaatctacctaagctcacctattggattttatatgaaaggacatttacacttgcacagaaatacaacaataattgtattcacatactctataaattatcactcttcaatttaagcaattcattcacatataataaagggtctagtataatcagttcagcatatacaaattattgtaaatcttgaatatttgtacgaataaaaaaaatcacatataagtctagctaaactattagttccccattttcatacaacaattattttttgtgcagttcaaaaatagtgcaggcaacagg

SEQ ID NO: 5252 - DNA, 790 bp, Glycine max
atatatgtgtcacatgttctcagaatacaaacatataatacaagattagcacgatgaaaattaaggttttactaactttccaaaaagaatgtatcatgtgaatcacgggctgggtgttgttggggctggaacaaggcatcaaagttccagaagctgccaattaaatagcacatacaagcaagaaaatatatgatatgagatttaaaaaatatatattttttaaatgtcacttcatttgtgatgttgcaatgcattgttcagaatttagaacaacagtttcttttcaaggcctcaagcaactacagaaagaacctttccaagaggatttatctatcgtaacaagaacatagttccattagttacttcaatatcattcaaaggcccaatgaaacaacttatagaagacaatgaatactcacaaaaaaattcaaagctataactttttcttagaaagaaaatatattccacacatcatttaacatctttgagaggacaggaaagcaacatgacctatctaaatctcaatcagagacactaggaagccattgatataaaaacgacaaggcaaaaataagatcaagttacttacatcattgccatcaacatcttcaattaaaagatgatatgtggatatttatttaaaattttgcaacacatttaatggattggaagttaatcgttattgggaagaacacccacatgtgaatggagaacttgatgacaaaaaggaacatgatccaaacaataataacctgctctcaacgaaattatttgttggcatctcctcaaa

SEQ ID NO: 5253 - DNA, 724 bp, Glycine max
gggaagtatttgatatggttgagcaggaggaggtagtgggtttgaagctgttccaggtggagttggtttactaccccacgaacactgcacaaatcaagttaaataacttttattcattgaaatcttatgagtaaatacctctagccttaaaaaaataagcagtagtagcaagaacatgcatttaattgtgttatgatgcttaagttagaggtgcatcacatccatggaattgcatttaaacttcaagtttcagaagcacttttaacttcccaacaaggtaagtgcaagtatacatgcaaaatgaaagaattctcaccttcatattcttcccacgtacaagtcttccattagccatctgaatggccagtgcagcttcgtcatgagtgttgtatctgataaatccaaaacccttatccctctgaactcgaacctcctcaatcaccccagcccccagtgcgtggaactgacaatgaagttcagcttgtgttacctgtgaccccaaaccacaagtagagagaagacaagttacttatcaagaagcatgtgaactaaacagatcataatttgtcagaaattccaagactgagattcagatcagaccaatatgatgccatactgtcacagatttggcacacattcatcaataagtagatgataggaaggagccttaaaatgctatggaagccacatacatcaaacacactgcaaaatgcagtccaataca

SEQ ID NO: 5254 - DNA, 685 bp, Glycine max
acccttcagaactgaatattgctaacacacaaggcaacaaccaaacttacacgacaaacatccacactaaaactgaaaaacacaccttcttgcttgttcatcccgaagtttggcatcaaattctttgctaggaggatactttggcaaacttgaaggatcacaaggtagaggctttgttgtaaagaactaaatagcaagcaaaccaaaaggagacagtcatgacatgcatattgaagtatcagcaacaataatttacatccaaaataaaatagaaattaaagcaacaatgcagttgagtaagagataatgaataaatacacacgaatatgcgataacatatcaggatatataagtgaggacttgcaataatagtaacaataagaattttctactatattacattcttggaggcaatacaggttaggacttgcaacaatagcaacaataaagagacaacaaaggagcatcaatttgattaaagcaaaaggaaaacatgcacaaaaatgacaaaaaattccaaggttgtcatattttggagaatacacaacctaagtttgaaatataatttaatccaactctttttaccaacatgaacatccactcttcgttatgtgtactgactgatattataaaatgtactcaagtagtctgaaaaattcatcatgaatttcatacctcactcttc

SEQ ID NO: 5255 - DNA, 664 bp, Glycine max
aattgatcaaaatacatactataatgctagaaaatcaactgtatacagtaggagtttaaggcgacaatcttagcatgtaccttagggtgaaaaaataacctttaagaggtccatttctccatatatatgaatatttacttaatgtataaaatcaagagaaagaaaagaaaggacaaaaggagatcaaatgcaagcttcattgaaaatgaaaaaacaatatagtcgatgaagtttgctctaaagattacacctcagatagatattgaaaagagcaggcttacaggaattaacatctatagaagtgcccggacgcctcaacatcttgagaccttgtattgaaatttccaaagggtttttttatggttttcaatgatcaagttaagtttatgttcttttctaccatgcttttgttaagagctcttgtaaataccagtgaaattcaatctagaaatgttcagctcaatgtaaatacctttgagacgtgtgaaataggagacttgctttgaaagagagtcaaatcatccgctgaaggtggttcagtaaagcaatttttggcaatggttccacaagcttctacatagcaccaatcagggatatcggttgttccaatcatcaatgcaaggttacaaactggattgattgcagcagctgctacaaacttgtc

SEQ ID NO: 5256 - DNA, 662 bp, Glycine max
tgcctgcagcagcaatggcagcgaagcggatgtccgaaggggaattggatgccggcaccggatacctgccaaccgagtcagggaagttaagaactgcctcgttgcctttcagggccaacgccgccacatcgtaggcggcggccgccatctccggcgtcaggaacgtccccagccatatgcggtttgtttttcgcggttcgcggatttcagtaacccattttcctccgcggcaacggattccatggtacaatggatgcctcttcgatgatgatgatgatgccatgcttgtggtgttgtttgcaagcaaagaaagggtatttttggcacgtgtggaaatgaaatgagaaaggaataggaagtaggtgggtctaactaggaaagaggaatgcaatttaaaacttgtttattgtcactgatttaattggaggatacgatattggtgagaggaatatatatatttatatatagtatcatattcatgtgtaaggtacacaatgagacagtttggtggtatgtttgaagatgacaaaccttggttctattcttgtttatatatatacatggagtaatggtttggaatgagagcgtgagcataagacaacattgtagtatgcaaaagtgaaaccgtgggaatttcgcggagtaactgagtaatgggtgat

SEQ ID NO: 5257 - DNA, 744 bp, Glycine max
aatatgcatatattcatataaaagaagaatgtaagaaacaatcgtttaacataaaaaatgttttgaagaaaaaattgtgagattttgcactcacgcatctcgaaatgtcgcattagcaagtttggcatcagtggagaggatcagagaaaaggcctgattgggtggcagatttacaaaaagactggctccctggtataatagaaaacaacattaagctagcccatgtttaatttggatggaaaaaaaaaacgaaaaagaaacaatacaaaaaaaaaaaacatctgagttatttagatttaaaatatgagaaaaaaaaaaactaagcttttaaatgtctcaacataagttatatatcccggccaaatgataaaaaaaaccaattataactctgaaaggatttgttttgaatgaacaagactcttgatgaaaagacatcaataaatctttatctattattttggtgttctaatttaagcaattatgatcttagtatttactatatatgagaaaattatttaatcatgatgtataaaattattaacaataattacttttgagcaaaaagtcaaaccaaacagtgaacacactctagttagaagaatgatgatacctcaattagctgattattaatggttaaattgctgctgaaatctctgtctaatgtgctagcagcaattgtgaagacccaaggagccacattggcaacagttccaggcgttggtccatcatttcctgcaggcaaaa

SEQ ID NO: 5258 - DNA, 767 bp, Glycine max
gcatcctgtctaagccaaagttcaacaaaccaaaggagttatgggggatggataagagaggagtagaaggagggacaaggctgaccaaaggagttatgggggatggataagagaggagtagaaggagggacaaggctgactgcacaccaacacaaggagttgggtttaattttagaacaatatgcacaagtgttccaagagccctttggtcttcctcctagaaggaacaaggagcacgccattaacttgttagagaatcatggagcagtaaatgtgagaccatacaggtatccccatcatcacaagaatgaaattgagaaacaagtccaagagatgctggcagcaggggtcatcaggcacagcaccagttctttttccagccccatgattctggtaaaaaaaaaagacaatacatggaggatgttcattgattatagagcactcaataaagtgacagttccggataaatttcctatccctgttattgaggagttacttgacgagctacatggtgccaacttttattccaagttggatttaaagtctggataccatcaagtaagggttaaggagtctgatattggtaaaacagcctttagaacacatgaggggcattatgaatttttggtgatgccttttgggctcatgaatgctccttcaactttccaaagcctcatgaatgatgtttttcgtccgttattgagaaagtgtgtgctggtgttttttgatggcatactaatttatagcgcgaagcatttgaaggaggt

SEQ ID NO: 5259 - DNA, 752 bp, Glycine max
atgctttaatattacaacagatggaggtagatgaggttcaggagcccgaaaatgtaactggaaacatgatatatccttctaagattgagattcaagaaaaggaaaaaggctgtgactctaaatactctatggtaaatgcacttcaagatgccaataatagtgaacaaatggagcctagaactagtggcaagaaagggattgtatgcggagttgaagtagcaatttctgaagaaactattgaatgtcagaaggaagataaaacaaaggtattcttctaatattattgttaattttcctcctcgatgttgtattattgttcttaacttgtcatcacgttaagcttcattttattttcattactttcaattttttcttagtatgtacctccaatgtgaattaaagattttgatcccatgatgatccttttgttatatctagtttagtgagttcaaaatattatagattagcattgcattgttttacacagttcccctccctttcccctaaccaataattaaaaaaaaaaaaaagtgtcgtcacattgttgtatgtctatatgtctttatatttcagttcccagttatttttcctattttagctttagggaaaaattaactaaaaatcagatacatgataagaattatatgttcaaccatagctttggacaccttatgtcgagctccatattgcggaccgtgtaatgattataagactagttacattgattctctttttgctacgtttgatcatct

SEQ ID NO: 5260 - DNA, 757 bp, Glycine max
gactcgggatttggtgaattgacctgtgtctcggcctcttcatttctggggttctcttcagaagcctctgtggcactaggttgaggaacaggtggtgctttgcttagcatgtactcgtgtatctagaataggcaagtataatcagcagcacagtatattacagaaaacacaatctgaggagaaaacaatcagcaacattttacctcatcaatcagcttttgacgttcaggagtcccgaattttggaggagcttcacgagacttaatggccagtgtacgcctctcttctttcttgtagtctaaagatcccaatgcaccatttgggttggtaggcatgaacgcaatcagtgcaactaaagcagtcctcactgccaaaagatatttacatcaattaaaatagaactttttaccatcaaagacatctacaaggctcagcctgtatagttaaagataatgcataagatctacaaaaatgaaggtagtgtgttaaagaagaatgatgaaaaaaacagagatgcattcatattctaattatacattaaaatgcaattaatttgcttgatcagtattttctacccaatctttatagcatccaaccttatgatctaaagatatgggaatcaatacaatgccacttctatctagaggaagccatgttttgtgccaatgtatgattctacctagacaacaatagtaattgataattataaagcacacagtcaaatatatcaggccattttgtaactgcaggcatagaa

SEQ ID NO: 5261 - DNA, 783 bp, Glycine max
tacactgtctgttttctttttcttgagtgaaaaactagatctttataaattatcttaacttcaatatataggtagttgacacaatattacatttgaaagctataatcatgtgggctgaccagattttgtgaattcagaagctctattaaataccaatctaaccttgttgcagcatcacttcttttactttattaagtcatgtaatgcagttttatcctctaacttgcgataacataatgatgtatggtgttacttattttttacagcaattgttgattgcttccagaaatctggatttcttcaccagtggctaccgctatctaattcaagttcttcctgctgctgttgttgcccccctgtatttctcaggaaaaatcgagtttggtgtaatcaatcagtcactttctgcttttaatcatatccttggcgacttttccctcattgtgtaccagtttcaagctataagtgctttttctgctgttattaatcggttaggtactgcattatttttcccttatctttcctgtaacattttgatatatgcaaatctcatgatagatatgagcatgagtgaatgaactacaaatttttactctgcggaaaaaggaggatccattttgatataatttgtggttatgtttacataaacacattaagatctcagaaaagaaaaagaagtattacaatgtgttaaagatgttatttgtgaagtcagccaactataactgtccttgtctatgaatactttccatcctcaatttcctctctctcatccttttgtgc

SEQ ID NO: 5262 - DNA, 765 bp, Glycine max
acctgaaattcaatatacccacaaaaagtgttatctaaaatcttaaattagaccttatgagcaagaaaatatagcctacaatggaaaaatttatagacaactttctattataactgatcatagcggtagattaatgctcagggaacttattgttaggaattttataattcctaactaattaatataagctacatattataatatttagattagttatttatatttagataagtttaatataaagtgatctaattcaataagtccattagactgtccaataaaaaattgatatgaacttaataagcggaaaccagtttgatccattaggggataatgtgaatcctaataggttaaaacaaaagtcccccaagacaccaaatcaagaaacagtttctctcctctctatttgaagagaaaatgaaggttccataaggaagaaagtgatttgattgaggaaggtcattaaaccaattgttcgtgaccgctgtaagattccgctgcgtgttgatcaaactctatggatccaggtattccttaaaacttcttgataatctaagttaatgtattttggtgctcatttattattttataaggtttattaaaattcccaacacttgatgtagttagcaatgaaaccaataagaaaaaaatgtgaaatgatgccaagaattatgctacctccgtaaaacaaataacaagaacattcctcaaccccgaaacacaacttgatatggtttcaaaacagtttagtttcacttttttttt

SEQ ID NO: 5263 - DNA, 797 bp, Glycine max
tgcctgcacaggctttagagccactgtgagttgtgcaaacgagggccgcaaatttggatccctgaaacggggacgggggggcagaaaaatgtcaaactggagaatgaagtgtagttgtaaaatttcctgaaatcatttaatggtatgtggaagaaaaaaatgaataaaacaaactttaattgagcatgcttactgttgccaacactcccagattattcttgcaactataggatcgacttccttcggaatatcaagtctacggttttggaaaccaacggcaccaacaacttgcatagtattcatttcactccacggcaaccttagagtggcaagctcccataggatgactccaaaactataaacatcgcatctgtatttgaaatgatgattaatagagatgcattcgatagacacagctatatattgttacaagaaaagtagaaactagcacatatgtgaatctaaatatatgttcaaatgttaaattgctatagtttataaatttccagtattttgcttctcaaactgctgtagccatgtctgccaagcattaatattttaccacaaatatcaataaaaataaaaataagctttttatgattggagataacaatccagtaatagaacacaccaatgaaatagggtttcactattaattaccaaatgattaaaaaatgcttgcaagttaacaaaatgcttttcatcaagcgaaaatctgtaagaaaaggcctaacaaaacctattttacttgtgagatatgaaattgttataagtattgttttaataggagcaggtca

SEQ ID NO: 5264 - DNA, 790 bp, Glycine max
ggtatttctggtacctcatttctatatataatttttttatttgtcgattttaaaaaaaaatgggttgacatgggccaacttgcactgagatatatacagaacactgacttgagggtaaaggattttttctttgatgtctcttagcattttgacaattaattcgcctcaaatcaaatgcttgccgatttttgttgacgagggtggagatgattgatgaagataccatcatggtttggggtcatagcaggtgtgtaatattttcttttttaatgtgtagaatagttatactgaggttagaatctttaacttgatacatatatgcatcctctaaaaagcgcgcaggtataacttccttcataaccttaggtttacgagtcaaaatataagggctttcttgggtcttattggtactgctttggtcttataggctgagttgatggctatggaatagaggcactcttagcattgtatacaacagtgattcttaacttgttagacaaggagttgattcattccactatcttgctcctttgattagaaatattcttctttggagcatgtgttgtgagaaagtaacaatcgcacggattggttacccaagcacagataagattccgaaacttctctccaggtgtgggatgctttcccaacatctgatttctctgttttctttattcttatgtagcacccttaaaacaaaatcaaagctcaattagtctattatatacatgttcttgaataacccaattttaaccaaacacaagtttctttgtaagtaccaagttacccg

SEQ ID NO: 5265 - DNA, 741 bp, Glycine max
tattggacaacaattactatctagccaacttaactacagagctgtataagctcaagatgaattctgaatttcatgccaatgaagaacagctaactggtgccacctctagagaactatttgtcggcagatgtaatttacggtaagcatatggtgatggattgcacaaaacagatttctgagttcatcaatataagaatttggatttgatgaacagttccttagtaaatggttgaatggcataattttttaccataacatagctgtaacatgaaaataatcttcagttcgagtttgaaactattcgtctgtgtcaatcttgtctcaggcgcattagccaacatggggatagatcatacaggaggcaacttctcaaggtagcaaatgctgctaatacacccaaaatccaaggggatgttaaccaagggacacttaaacaatcagcatcacatttccgtttttcattaccaccagattttgagcctttctcatcatcaccatcagaaagtcctttatattcaccaggatcagctccattatcatattcgccatcgccatctccatcaccctccagtatttttttcgctccttcacctgtagtgttaccaactccagacatcccacccccagtaaacacgcctgtcactgtgtctacaccacccgagtttaattgggcgcctagcccttcatcattttctaaccaagggaacacaaatagttccaatcaaatacatcattcagtga

SEQ ID NO: 5266 - DNA, 789 bp, Glycine max
agaatgggttgagagaggctgggatagatttcaaattcagtaagcttcttggagatgggaaagttgcagcttcaaatgacaagtctgatacaacggaaaaagaagaggatgaaatatactccctggttaagcatttgtttctcttcctagtttttaatgaaacttgttcccatcgtactttgcattttgaagacccgtcaatgaattctttgtgcatgcatgcaggctggtgctttggaggatgttgttaaggcatctcagcttgagatcatcgagctgaagcatactgtgggtgaattaaggtacttaacatcagaattaaatgcatagttgcttgcgtatttgcaatttgcagttgtgttgacatcataactttttttctttgcatattgcttaactgcattaagggcagagttgagcttacttaagcagcatgtagaagctcaggccaaggagcttgaccatagaatgcatcgggtagaggaacttgaagagaaggagagagtggcaaatgaaaatgtaagtctaaatttgtttgtgattttaatttgatctagttccttaaccatggacagttttatctttaatatttgtatattgtagaacatagaattttgttgtgtatcctaggctgtggataatttgtaagggacatttgattgtttgtacttctctgtcacaaagtaacaacttggcctatttgtaatgtagattgagggactaatgatggacattgctgccgctgaagaagaaattaacagatggaaagtggcagcagagcaagaagct

SEQ ID NO: 5267 - DNA, 714 bp, Glycine max
agctgttgcagaacataatagttaggcatgtttttccaaagagaaaaaaagaattgcattcaacaataacaaatccgaggcattcctttttggacttgccctcaaccaatgccacagtaaaagcagcagtaaaagtatcaccagcatcagttgtatcaacaactgttttagaaagtatggcaggctgctgaattggtttttgggcagatcctttgtgcccaagtttaacaagaacttgcttagctccctgaaatttcagactaataacaccagaactaaaaccattgagtctatttctgttcactacaataaaaccattattcatctatcattctatcaaccttcaggaacccaccaagacatttgaagattaattgtaagacaacttccaatctactgcacggtcaatgagagacagtacagagaaaacaaaagaaatatcaaactccaagtagtttatggtcattagtgacctttcccaccctatagtttccatttccccttatggtgcatttaattggattcaaggaaaagaaatcaaataaaaattataatctccctcccctttcattttcccaggcatgttgtaaatgccaagaggactaaacatctccatttccttcaacataagggagtaagagccgtgagaccctgaatgcatgacaattttgtagaaggatctctgatgaacatcaatatgatgaccatttcttt

SEQ ID NO: 5268 - DNA, 759 bp, Glycine max
  misc_feature (546)..(546): n is a, c, g, or t
atgtgctcaagggagcttatggttagtagggggaattgccctctctgcaacaatttcattttggagattcttgacattttctgagtttttttttctattttctgtataacttctgggaaattgttgtgtttactatttttttaacttttttttctgattgattgttactgttcttgattattattattgctattttgggtttgtttctccccttgtgaggtgctgttctgaggtgtgaataggaatgcggatgatcatgttaatgtttctttcttgccatgcatagagatgaagttttcggagttagtttgtatttccctggctcattatttttcttctgtatatgatagaagttatgtaattagtgttgcgaaatggagatgatgatgagaatggataaggcatacaatttctttcatgcgagtccttaccaatgatttattttttccttcctcaagttaggaaggcatatttctgcaattcaaatgatagagctagcgataaagacaagtttctatgttctataatcttgcttttttttttttncatgaatggatttgaaaattctcagcttattaatgtttctaactgggtgatataagttatattgcttatttttctgtatcccaattggggttataaatttgaattccactctgaggtcgctgtacatgcactacattgccgtgagtctgtcaccactcttactgtatcggcgatattccataaattaggaacataaatatcatcatttgtaca

SEQ ID NO: 5269 - DNA, 815 bp, Glycine max
tcaggtgttaaaagttaaaatcagcgaactccatgatagtaagtccagcaagcatctgtcatttacctgtcatagatcatccatttacagtccataaaaacctcaggtgatttttcgtgcagattatgttataatggtctcatgtgtcattttagtggggctattttccattcagcatcatggcacacatagagttgcttttttgtttgctccagttgttgcaatatggcttttgtgtatcagcagtattggtatatacaacatattccactggaacccgaaaatataccgtgcactttctccaatctacatggtgaagttcatcaaaacaactgggattgaagcatggttgtcattaggaggagtggtgctttcaatcacaggtacttattatatatgtctaagctattttattagcagccagttggagttctggaagtgatttttctctgaatactctctcaggtgtggagaccatgtttgctaacttgggacatttttctgctctccctataaaggtaaattgacagtgcagtttatgtttaactaactttatgccgttatgttgatctgccataccaaattaaccaaaatgaattatgctttaacagtagtactttaatctcagatagctttcacatgtctagtatatccctgcctcattctggcatatatgggtgaggctgcattcctctctaggcatcatgaagacattcaaagaagtttctacaaagccatactaggcaagaatttaagtaccacagactatctatattatttttggtctctccagtgaaactgtcactatttttact

SEQ ID NO: 5270 - DNA, 780 bp, Glycine max
atagttagtgaaaacataaggcttctgataaggaagttttctaataggttcctcgatagggaagcaattcttccacactgtactcaataaaagaatatttaccataatgcttagtcctaatgcaaactatggcatacccacattaaaattttgggcacagtgaagattagtaaaaagtttataaatactgcaacttgaagcaaactcatctaacttgcaaataataaatgaggttagcaaatgatgtagctaaatcttaacgtgtagaatatactgtagaatcaacaaaaagtgacagaaaattaatgctttagtctgtttgtttaggtgttccaccctccatttcccacattccgagaaattgaatgtgactaaaaaaaaattgatatattcacgttgaacagagaatggttttggaaagacacccttagtgaggcattgccacattgagaagtgaaggactctttcttgcagacccaagtgtgttaacttagcaacatacaaaacttagttgtaataacatggcttctctgctacatgactcctaatgctatcacctaaattgtgattgataatctcactcagacaatcaacttaggtcaaaagcctttttttttccggtgaatggaaaaaagaatcgcaaccccatctagtgggataaggcgttgttgttgttgttggaaaaaagaatcgcaagtgtgtcatagaaagatagggatctcaattttgctcctccagagatatcattgtcctgcaagaaactgcaggcatgcgaacttg

SEQ ID NO: 5271 - DNA, 765 bp, Glycine max
ttgcatgcctgcagtcctatctagaggcattcaactaattcatacagcacacatactactcaaggtggtacatgaaaataccgtgctggaagatatttcacccttagagaccagggcaccaactataaactcaagagctgctagatctcctatattggaatcagtggcaagactcaaaagattattggcagtttcaattggacttttcctgatatatattgtatggaaagcgctctccactgcttcatagatggatttatcctgagaaaatacctacaaatgagagatgacagaaagaaagaattaattttagaaaaatcaaggattacatacatacaaagagtgcatagcctctaacacattaaaaaacaatcaaataaaccttgaatatccttgtttcacagcaaggttttaaattgcaatctgcaaccacagttgcaatcacatttgcctatcatttccccctatttagataaccacaatatgactgtgtttgcaacataacgtttcactataaaaagaacaacggcttaccaatggtaacatctttcgaagacattcctcagagtcatcaatctgaaactgtttgcatctcatcaataagagaattgtgttctctacatcagtagcagaagatgaagccatcaattggacaagtgttggcattgtggctccaatgcatttagagaaccgcaatccagcctcaagagatgcaaccaatgccctagtctgttccaagttcccaacatctggcacactactgtt

SEQ ID NO: 5272 - DNA, 737 bp, Glycine max
aattaaattattttgataaaaataaataatattttttttggttcaaacaccaccctacttagattattatgagattaatccttaatatgaatttaattatctacaagaatatattcctgatacaacattttacaaattattaattattatttttttcaataaattgactgatatgttagcaaagataaattatgaatagtactagtacattttgaaaatagaagtaaatgatgaatcccttgagtttgtgatatagagagagagagagagttatgagcatgtatagctatagttgtatctccacaagcacaatgattcgtcggttatggtgtttacagagcggctctccctccgtgcccccctcgagcaccaagaagaagaagccccttgtcttgttgggcgcacctcatgtaggtaacctttttttttctttctttacttgtttcattcattgattgtctactttactttacttttcaggtctccgccatcgtccttgaagcccttctgaacgcttctacttgtccagattcttcatttgaggttgcggctattgtgactcaacctgctgccagaagggacagggggaagaagctctctctctctcccttggcctctcatgctcttcagaggggcttctctcctgatctcattttctctcccctccgtgctggtgacgtatgtatctcttctacctttctttatgctcttcttattttattttctcatcacttctt

SEQ ID NO: 5273 - DNA, 687 bp, Glycine max
aagtgggggtgtgagctcagtaggttccggaaagtgaaactccacactgtaatccctccacttctgaggtgcctctggtggggcctcatcctcgtcaaccttgcccttgccctttcccttgcttttttccttagctgctgcaaacttagcttgatccttaacttttttttgctgagcctggtttccacttcttttagccgcttgcaattgcttggcataaatatcatacttcttattcatctctttacgacgctgttcatacccgctctcaaaatcatcaaaatttccacgatagaaatgaagtttcaaatcatggagatgaataatctcagtacacactgtgttgagaaaatccctatcatgtgagacaaccaccagagttttcttccaacggcacaaatactcttccaaccagagaacagccctcaggtcaagatgatttgtgggttcatcaagcaataatagagttggttgcacaaaaagtgctcgagctaaagaaattctcatcctccagccaccactaaaggattttgtaggacgggcttgcatatcctttgtaaaacctaaaccagctaatatctttgatgcttgagcttcagcagcatcagatcccatcagctgtagtttttcatatagctctgctagcttctctcctgtatcgtcttcctcatcattatctttgtcttc

SEQ ID NO: 5274 - DNA, 725 bp, Glycine max
atccattcagtgtttcttctagccctttggatggaaagaatcaccttgctattctcattaaggttcttggcaaatggacagaaaagttgagacacaggattactgatgttgatgcacaaaaagattcatctgtcataacaacttcagttgaggggccatatgggcatgaagtaccataccacttaatgtaagtggttacaagcccatttttttttctatgttgcacacataatacatgatagaaaccttggtttagtccttaatatgcatatactttcagaccaaagaagattttgagtcaacttatgctatagttcttcaactaatgaaatgattggtcattttgttctcttaggtacgaaaatcttatattagtggctggtggtattggactttcacccttccttgctatattgagtgacattctccaccgtgttagggaggggaaaccctgtcaatcgagaaatattttacttgtttgggcggtgaaaaaatcaaatgagcttccacttctctcaaccattgacatgcaatcaatttgtccatccttttcagataaagtaaacattgatatccatatttatgtcacccgagaatcagatcctccagtggtgagtctacatttatttttacaaatttgtactttctttcgttggtgctatctttctaatgatttatttattaacttatttgtttttctcttaattgcatttgattgttattat

SEQ ID NO: 5275 - DNA, 793 bp, Glycine max
gcctgcatgcctgcagccaatatttagaaaaaatatcaattcttaacaatttagaccaaataactattaaataattatttttaaacacaattttactttatttttctattatcaacacaattatttagcagttatcataatattacttacatccaacaaggaaacttattttcttcccatgcttagtaaacacacgttttaagttttctaacttcataacacatctgcaaaacatttcaaagttctgtttcaagctcccctgtttcatttcaggtaatctagtatctatcccctgcatatctgttgagataaaggtatgctctccataatgtcatacattattattctttggtacatgtcctgcccccctaccattagacaacaacttagtttaaactttaaaattttaaattaattatcaaacttgctctcctttactctctctttttcctgttgttaacatttaaagtgttgttctgaacaactagcccaaatgtggatttattcctctttcaagattcatatctgaaggaactgctatcaaaaggaggataactcgctttcaaatgcaccaagctctgaaattgcatcaaggagaggtaccccatacacaattttgcctttaacagtggttcagctgctgtgtagtgcatacatcttcctgtggtcatatcatgtagtctcaaagtcataatttaatctgttgttctgttgatggatgttaatataatatcacttaaatatacactatcttttttaacctttaaatttgagacagatttatccaacatat

SEQ ID NO: 5276 - DNA, 740 bp, Glycine max
ctacattacttctatttgggtttgttgcaagcaaatgtgatccttcactcttcatctacaagactaactctcacacagtttacttgtttatgtggatgatattatcattattggcagttctatccctctgattcagcatctcacttctcagctaaattccaagttttccctcaaatagcttggttcactggattattttcttggaattgaagtcaaaactcttccttacaagtgactattactcactcaaaaatatatctgagatttgttgcagaaaactagtatgacagaaactcaacctatctcatcccctatggcttcaagttgcaaactcacaaaaattggctttgatctgttttctgaccctactctgtacagatctgtggtaggtgctcttgaatacttaactatcactagacctgcgataagctattcagttaacaaggtttgtcaatttatggccaatcccttagaatcccactgggttgcaatcaagagaactttaaggtatttaaaaggcactgttttacatgggcttcatctcaaaccagcacctggatcagacctatcctatgagagctctttgtgatgcagattgggcatctgatgttgatgacagaaggtcaacttctggtgcagctgtctactttggtgctaatctcatatcttggtggtgctgtaagcagcaagttgttgctagatctagtacagaggcagaatatcgtagcctagcccaaatt

SEQ ID NO: 5277 - DNA, 712 bp, Glycine max
aagagcagtaggtggatgtgcagtatatgtcaggtaaggcaccaaagcagatagaagtcttggtctcgctgggttacctttaaaaaaactcttatttaatcctataaaaattggataaaaataaggtatttataaaatttgatacatttcagtgacaagcctggaaatcatgattttaaaatcctcgagaagctagtgctggctgatggatcagtcttgagagcaagatatgccggccgccctactcgagattgtttatttgaagaccctgtaatggatggtaaaaggtaagttaaaatgttactatctgtctctaagagtggccagaattttcgaaatagttttcattctttactgaaaagttagaagtcattattattgactattttacagtctgctgaaaatttggaatttgaatgttctgaccggggtggtaggcgtcttcaattgccaaggagcaggatgctggccactgaaatcattggaagccgcacccttgcgcataaccatttcagggaaagtgagaccccttgatgttgaatttcttgaagaggttgcaggtgaaaattggaatggagactgcatagtatatgccttcaatgcaggttcaaattatactttatcaatgcatcacattttattctatactttcctgttagaacctaaaacacatccatttctctataattaccaaaactaactactgcacaat

SEQ ID NO: 5278 - DNA, 768 bp, Glycine max
agctgtttccgtatataggacacaattaatttataacattttagcaaatgaataccaaagtacatttcagtacatattaacatagataagacatttatacactactgacaatgatttacccaatttagtattgtagacttgtggtgccatgtttttaacttttagggaacctatatatcttgtagtatactagtattatggattgatgagtatgggataaaatcttgatatatcaacttattaagaaatcaaggtgaaaaactatttattaatccatgccttgtgcctatcacgttgtcatgtcacctattacatttcttactgtgctgtctagctgccttgtgattaagcatgatattactggagatgtaaaatttggtgtttgagaaattagtttagtgaagtacaggtttaatatgattaaagttcctactgtgctgaactctccaaaatctaaatttgtcctcttagattttggagagtctctttgtaacagaatttggactctccaaaatctaaatttcttttgtgattttgagaacttaaatttaatgcagtttgctcatgtatttgcagatcagtatagtgagtcaggagcctacactcttcaactgttccatagaggagaacatagcttatggatttgatggcaaagtgaacgatgttgatatagaaaatgctgctgtaatattttctgtcctcattctccaatgagacacctctctcccaagtcccaactctcatttgctcataattggtatgtatttg

SEQ ID NO: 5279 - DNA, 829 bp, Glycine max
gagtccaacgttttgtgcggccatgcactccaactcccataagaaggtccttgaaatgaggaacaagacaggcaccaaatctggctttgcaactgtttctgctgcctcaccagaactcattccaaacactaacagcagccttacccttgaatatatgtgaaagggggaaaggaaggattctagttggagaattctctaattctctttcaagtcttctcttgagtcatgtcttatacaaggttttgaattgcattctacaaactgcaatgttaaaggttttagaggtgtctgcaactgcgttgtggttgcggttgtgactgcatcagccatatttgtccacaattttgatggcaaccgcaagttaaaaccttagtctttgtgttatttcttgtctgtcatttatttttctcattggatttttgtacagggctggaatggggggataggagcaaaatagaacatgatcatattgtagctatatttagaactgaagaacaagggatagagatatgcaagtcaaagagggtagagtcaccagagtgttagccattttaggtctagtaattgtagcagtactcaggaggagtctttgttacttttcttattctcatcatttttcaatttttttttctttaatttctgtttctaaatatccctccctgtagcaaattctttttgctgttcatttgtagcaaaacttatgagttgatcaggaaaggaacttttggaatttgccttcttccttttaatattttgtcttgtgcatatcctttcctaatatctgcaagctacaatgagtaagtatatgccagttatgattttgagcaat

SEQ ID NO: 5280 - DNA, 775 bp, Glycine max
tacatacactatgtgaaagaacatttcagaccagtccttacgagagaggctgaaatagttatatctagctattatcaacttcaaaggaaatctgctactcataatgcaggtttgacctagaaacctgttgctatgtaaattgagtataatacttgatcaatttatgtcattttccttggttgcaaatttgcaatgtagctagaacaactgtccgtatgttggaaagtttgatacgcctagctcaaggtatgtaactaggactgaatgaaacttctctggttaacttatccctcttatgtgttttaactctttaaatgtcacagcccatgcaaggttgatgttcagaaatgaggtgactcgactagatgccatcacggctattttatgcatagaatcctccatgactacctcagctattgtggattgcattgggaatgctctgcattccaattttactgacaaccctgatcaggaatgtatccttgctgtctttctttgcataaattagccttgcatacataataaatttaatgtaactatggaaatcaagccttatcctactaaatggggtcagtcacgtgggtcattgagtgggctcttttgccaaaaatgaaaattatagtaaagctatttgtgtcataataattttatggactaaatttttttcttgaacctaatacagtgatatggatattagtgttctttagtttacagaaaatttttatgtgatcttttcacatagtaatatcattcaccttagtcaaaagagatctat

SEQ ID NO: 5281 - DNA, 731 bp, Glycine max
tttcataactactgtatacaatcctgacagaccggatatagaagaacccactacaaagacaaaggagccaagtcaatataaaaacaacactggcagttcagatacaacaaattaaactatcactgaattaaatcaggaaagtataacaagtagcatcctaaccaactaataagtgatatccatggatcatacacactttaaactatagtgaatgttttacaggattcattgtcatgtaaaagggaagaatagaaggacaaacttacctgagagactataaagaatgaaagatgtaagatcacccgaggacatgtaacccttgattgtcaaattagctccatatataacaactataataactgaaagtgtagatgcagcattaaggcctccagaaaagagtccaacaactttctgtattgccaaagagatatatgattaaatgttgcaaaggtaaacaaataaaactacacacaagcacatatcaaactataactggctaactcacagcttgtttaagaccaagattaagtgtttcattaactttctctgagtagcgtgttgtttcataatcttcttgggcaaatgatcttactgttcttattgcaccaaaggactcctgtgcaacacagataaaaataatatcagtttaactatcttctcctatgatatgtatttgatgaaaaagacatacctcagctattgatgaagctactgcaggcagcgagatgcaa

SEQ ID NO: 5282 - DNA, 747 bp, Glycine max
tgataataatcctctatcaacaaaaggttcatattcttcgattccctgcttgaaaggccatgaaaagtgactggccattgctacctcagattaaaacccacattctttccaataagactgttattcggattattcatttttccatccttagatttgcattcttgcatgctgcaagcaccaagcaacacataatttgtacagcttcatttcttcattcatgtgtaatgaaattttggcagtgcccacaagaggactgaatttgaaatacatgtttttgcattagtccattgtaatttcattgtaaagcatgtgatagatttccgtgagtctcaatcaaagaaatttgaacttgaagccataatacaccgatggtataaaaatgttttaggcaattgacactgtacaatatttatactgaaaactaaattcatattattacccatgtaaagtttgtatcattttagagtttaatttcaagacatttttattgtaaaaaaattatgttattaaccaattaaaaatcatcttaaaaataattattataaaaattaacgtatgacaatttgtaattggatactggagttgataatttttacactatcggtaaattttaattaaatttataattttaaatcagcatttggttgagtaagtaaattattctcagtaaataaagtaattaataataatttccactccattaatcaaattgttagtgctactactaggagaatatctagctagtgt

SEQ ID NO: 5283 - DNA, 562 bp, Glycine max
ttaacagagtacttggtttctgccctgaatatcaccattgtggaatttgttctatatataatgatctgacagagattgagggtgtgatacctttgcacttgggaaagtttagtctgaatgagatttaatatgaagagaaactgctataatgtaatgaagtttgattttatgctgacaaattactgtcaattataattataactttcaagatgcttactgtgatttgcttgtttgataaaactagaacttggttttgtgatgtcaaacttatagctatgttcacattttgctcctgaagtttatgttttactttggtcttatggctttccattaaataatttaatggtgatctgcttattgcttattgtattggtcaagtttctcaggtcatgtcaaggagcagatctctggtagtgccgcagtacctgaaaaaaggcaatcagaatcaagttttcctatccaaagagagactcaaaaagactattatgcaatacatagtcgccagcttgataatttttccacacatgtctcaatatgcaaatatgaaataatatatataata

SEQ ID NO: 5284 - DNA, 765 bp, Glycine max
tgcttacatgcatagaaacagagaacaaacaaaaacaaaaagtaggattttaggaaccaagcatacactgaccttgaagctcagcagaatcaggtgctacagatattccatcaccacctttcttttttatttttgattttttagaagacaacgaagagatatcctgccaaatcattttcaaaattaacaaatgaaaagaatcaaacatcaatggcaaatattaaatatattatatttatatatctatacatttgtggaaaaattatcaagctggcgactatgtgttgcattatagtctttttgagtctctctttggataggaaaacttgattccggttgccttttttcagatactgcactaccatagatctgctccttgacaggacctgagaaacttgaccaatacaataaacaataagcagagcaccattaaattatttaatggaaagccataagaccaaagtaaaacataagctttaggaggaaaatgtgaacatagctataagtttgacatcacaaaaccaagttctagttttatcaaacaagcaaatcacagtaagcatcttgaaagttataattgacagtaatttgccagcataaaatcaaacttcattatattatggcagtttctcttcataataagatctcattctgactaaactttcccaagtgcaaaggtatcacaccctcaatctctgtcagatcattatatagaacaatatccacaatggtgatattcagggcagaaaccaagtactctgttta

SEQ ID NO: 5285 - DNA, 681 bp, Glycine max
taaacagagtacttggtttctgccctgaatatcaccattgtggaatttgttctatatataatgatctgacagagattgagggtgtgatacctttgcacttgggaaagtttagtctgaatgagatttaatatgaagtgaaactgctataatataatgaagtttgattttatgctgacaaattactgtcaattataattataactttcaagatgcttactgtgatttgcttgtttgataaaactagaacttggttttgtgatgtcaaacttatagctgttcacattttgctcctgaagtttatgttttactttggtcttatggctttccattaaataatttaatggtgatctgcttattgtttattgtattggtcaagtttctcaggtcatgtcaaggagcagatctctggtagtgccgcagtacctgaaaaaaggcaatcagaatcaagttttcctatccaaagtcagactcaaaaagactataatgcaatacatagtcgccagcttgataatttttccacaaatgtataaatatacaaatattatataatatatataatatttacagttggtttttgattcttttcatttgttaattttgaaaatggatttggcaggatatctcttcgttgtcttctaaaaaattaaaagtaaaaaagaaaggtggtgatggaaatccttc

SEQ ID NO: 5286 - DNA, 738 bp, Glycine max
agatggttttgaataatatctcgaataattctgcaaaataaagaaaaacagtaaataatgatttgggctactttgttgtaataccttccctattaaagagaagcatgctttgactcagatgagaacttcgctaaaacaaaattctacacatacccatactggtcaaaatatccaccacggccatcagttccaaaatcctctctgaaaactatctgtcatagaattaacagccaaactctagtttaaaattgtgccatatcaactctggcaatgcagtagttgaattagataaggcaacaaaagattgttaataaaaaatttgagatgcatgtaaaaataaagaatgaaaaaaaagttgatagatatgatagaacaaactatgaattgccaaagcttaaccaacaataccttccctaatttcaattgaataaatgaagtttaagtaacttttaacccaaagttgtaactttgacaattaaaaatcctcacctgtacgttgtcaatgttgtcgcggttccaaagtggcaagaaaaaccgatttgcaaagcgaagtaccaactgccaatataagttaaatgtaaagggattaatcattaggcaaaactcatgaaacaaacaaagaagccattgtataatcatttattaccaagttctgcactagttcctttcccaagtagtgatcaatacgataaatctgtggttcctcaaacaactttccaatctcagtactgagttcct

SEQ ID NO: 5287 - DNA, 816 bp, Glycine max
aggaaagaatcaacagctttagcatttggtgcctatataagaccaaatcatgtaatagaaatgcaagcagtaataaaaattccctttccttatctcttttctggaggctcctaggatcataacaaaggtcctcaatatccatatcagtgtatcccaaacccatcacatcagtttcatacccaagtggcaaatgcaggcagcagccatcctcagtggtcgtggggtcctcactatacacacttgaataccctaaacttgcaatctgacgcttattctaccatggcgaatacaggaagtggttatgctcaattattgccagatccccaacacacacatcagaatgcccaaaatactcaacctgatttcaaatcttccttggtgaatatgggccatgccaatgttgcgatgcaatcgaatgctgtgtcatcatttatattatccatatgttcctcaagaagttgtatcttccgggtattcatcgcaagggtatgtttcaacttcattctaatttaattcagcatcctttgtttggcatagggatttttattagttgtcgtaacttcaacatggagatgattcattgactgaagctatgatgttcaagattccagaggagaaagatttgtccgattataaatttaatatttataattgtttgctgaacaagcatacttggccatagcttaaggcattttgcctatatgaaatgaattttgtcaatatctaatgtctctgctatcgccaggtatggagccacagaaggggtgatattatcaagtggtcaacaaactggaatgggaagtgaatattatcagt

SEQ ID NO: 5288 - DNA, 843 bp, Glycine max
tgatcagatcagcgattcagcatacaaaaatgtaaacaacaagcaaaaggttgtaagatggctcataccatcacatcatttacaagcttttcaagctggatttgttcaatgtaagtgcgaggaacataggaaccatccaaccccagtttctctgctacaaatttgcaatagtttctgtctttcccttgaaccttcaaaacaacatgaacaagtatttagttactgacaacaaaataaacacattatagttgatatttcctaaataaagtcaacttatataagatgttgtattagtacaaagatactatgaactaccaacaaatataattggcagacattcagtccttcttccacatgtacttcgtaagcaccggctgtttgacattcaccacataaatatattaaaaatgattcccaaaccacctctagtctctacccatcaaaggcatatgacagagaagatgggagtcaataaagaagggaaaagagagaaaacactgataatattgtttgtagcacgtgtaacaaaatcctgaggcaagacgtgatttaccataatgaaggttaataaagaaaaaaacaaaaaatggcggcccaaggcctaggggaggatcaaaaagcattgccctcataaatggagaagcagtttccacaactagaattgtgaccagcagatcaaatattaattacaaaaatggagaaataggatgttaactagtgggaggacaacactcaacagaagaatggagggcaaaggggaagtaaaccagatgtgtatgtgtatggcaggtcataaatagggtacatatagtactgaaaattttaatgttttacaaattatat

SEQ ID NO: 5289 - DNA, 802 bp, Glycine max
attgatggataataataaatgtgtaagcatgttagttaaaaatacccaatcaaactatagattggataacaatcatagcatatgcttcagtttaaaatgtgaatcttattaaccagtgatataattagcgacatatgggccatttatgagaataaactgacccaaccttgttagtattggcacagagaagtgttgggagccatcgactttcccttgtatcagtcaataaaaaaacggaatcatgagcatcaattaaatcacacaaacgtttacaatcatcaagcacactgtcctgttcctggctttgtactggatgtccaggcattggtatagccataacaatgccttctgcttcctgaaaaaagaacaaaaagcatgcagtaatgaaaaaaatgtgattatcaggtttagcataaataaagtcttagggattgatgatttaccactgctggaaatatccgtttaagactttcaactgctgccgtagctttaaattccccaccattaagacagtcatccaaagtataaagagactgcctcaatgggttagacatagccacccttccattgtcaactagagtaatttttcgaacaccccatgcctgcacgagcaatagttttttcagttatcacaaattgaaggataaaagcaacaataggattctctgaacactcaccataagcatgcgcgcaacctggcatccaagtgttccagctccgaggagaagacacttcatggaagataaggcattcaagtttaaagaaggcaaagcacgccacctcatcagctttaaattcaaat

SEQ ID NO: 5290 - DNA, 743 bp, Glycine max
tgtgcagaggctcaaaacctacaaggctaagttggttgtgttcccaagaagggctcacaaggtcaaggtaaagctaaattcttcaattattattaatttgatggttatgtgcaaattttatttattttatggtcatcattcccttggaagtaggaaacaatattgaagtttgagattgtttatgtccctatttgctttgcaggctggtgattctacccctgaagagctggctaatgccactcaagttcagggttcattcttgcccattgtgagggagaagccaactgttgaccttattaaggtaacagatgaaatgaaggcattcaaagcttattataagcttcgtcttgagcgcaccaacaaacgccactatggtgcgcgcctaaagaaggccgcagaagcagagaaagaggacaaaaaatgaggtccttgagaagacagtttgtaattcatattatagttgtgagaaatttttgtttgatgttcttcacccatagctttatggagatcatgagttttaaaacaccgctattgcaattgtttttttgaattcaagtctgttaattttattcgcactctggtttgttttgattatttctttgattttgtccttattttggttgttcaagttgtgttttaattgttgccatgcacgtttccaggcattgaaggcatatgatggaccgtggtgtggttaaagtgggttttcaaattttaattgccaaccctaatcaccaaatttt

SEQ ID NO: 5291 - DNA, 794 bp, Glycine max
acaaaatcaacaaagaaaaccagtgaaagctttgtgtcttaccttgcactttattgctttagtgggtggtaggaatcttggggaagtgaagaaaggcgactcttgatcatagaattcaaaatttggagactgcaaataatgaagtatgtgatcagtaaatgtactagactgttcattatggggaaaaatgtaataacatttttccaaatcttatcaaatccgttattatcgagattaacaacacaaacttgggctcaataccacttcaagtcttctaaacagtgaaagagtcccattgttttttaatttaattatgattaactttcattcttggttaaccagttgcagtaaagaaaccaaattggctgaaacaaactttcaaattaagaattaaatgtagaggtaattttctggatagttaaacaaacctgttttgttagttccagattggcttcaaagaaggactttatagttccaatatctttccagtagtccctgaacatatatgcctgaaaattacaaatagaaacaaaaacatcatgaacagaaaaaagaatttaatttcattagcataataacattcaaatccatggttgggattcctctcacttggactttgtggtccctcaaagcagatgggataatttcagatccaaagtcattgcaagaaggacagctccatcttaacagtttcagtagggtctcagttctgaatacagaaacacccatgggtgcaatgtaaggatatgtctgtgcttcttctgctgttaagcctaggagagtggtatcaacat

SEQ ID NO: 5292 - DNA, 666 bp, Glycine max
  misc_feature (655)..(655): n is a, c, g, or t
gggaatgacagtaccactctggaaaccttgcgatttgaattagccaaaattgaagctgctacaaacagatttgctaaagaaaacatgataggcaaaggcggatttggagaggtttatagggtaaatatattagctactaccgtatgagaagagaatatcaatgttgtctacttatttaccatatttattattaatttctatgtttttcagggtattcttttggatgggcaagaaatagcagtgaagaggcttactggaagctcccggcaaggagcagtggagtttaaaaacgaggttcaggttatagcaaagcttcaacacagaaatttagtaaggttactaggattttgcttagaagatgatgaaaagatacttatttatgagtatgtgccaaacaagagccttgactattttttattgggtatgctacttctaaactatatttagtattagacatcaaacaagatgtatcttgaaaaatgaataacctttatgaatccattctgatttgaaccaaataaatgaccattcaagataatttgacattttttctagatgccaagaagagaagactactatcttggtctgaacgtcaaaagatcattataggaattgctcgaggaattctatatctacatgaggattcttgcctcanaataatacatc

SEQ ID NO: 5293 - DNA, 748 bp, Glycine max
aacaattctagccatgccaaaatctgatattttgggaatcatattactgtctagcaaaacattactaggttttaaatcacgatgtattattttgaggcaagaatcctcatgtagatatagaattcctcgagcaattcctataatgatcttttgacgttcagaccaagatagtagtcttctcttcttggcatctagaaaaaatgtcaaattatcttgaatggtcatttatttggttcaaatcagaatggattcataaaggttattcatttttcaagatacatctcttgtttgatgtctaatactaaatatagtttagaagtagcatacccaataaaaaatagtcaaggctcttgtttggcacatactcataaataagtatcttttcatcatcttctaagcaaaatcctagtaaccttactaaatttctgtgttgaagctttgctataacctgaacctcgtttttaaactccactgctccttgccgggagcttccagtaagcctcttcactgctatttcttgcccatccaaaagaataccctgaaaaacatagaaattaataataaatatggtaaataagtagacaacattgatattctcttctcatacggtagtagctaatatatttaccctataaacctctccaaatccgcctttgcctatcatgttttctttagcaaatctgtttgtagcagcttcaattttggctaattcaaatcgcaaggtttccagagtggtactgtcattccc

SEQ ID NO: 5294 - DNA, 773 bp, Glycine max
aggtttgaagtatttgtcaaaatgggaggaaacattgtgtggcaatgttcagttcctgtagtcctttggttgcagctgaaaagctgtctttgaagcttaactatttgctcctaaaagtactttggtataaggttgcacacctctttgtgtggtgtttcatgaattggctgtttcagggttgccatgtatagattgggttgctttattgtgtattttattttgtctccagatattttgttttggttcactctgttttgaaagatttcttatcctccatttagttgaactttctcttaaatctattttcttacaagacaaataaatgtaaaaggtgtagaagattatgtagcttggttgtgaaattattcacacttagtgcaagcatagttatcaatcccaaataattgtgtggactggccaaccaaagtgtgaagaaagaagccaataacaaatagaaatttgtatgaaatatgaataaactgagcagagatcaaagaggttgaaatcaagctagctgtgcaatgcatggacatagttatcaatattgtgctttagaagcataatagtggcatatataggttactgaaattcagttatacgttgttttgcaacttagttgttttaagagtgatgtaataagatttttttccttttagtgattgcaggcacatttagtgcgggctgctgaagtgaaaaaggccatcgaatggatcttaagcaaccgtgatggtcattatgctgctgattcagttgtggcggcaattgctcatggt

SEQ ID NO: 5295 - DNA, 766 bp, Glycine max
ctgcttgcatgcctgcagatggtttctctccccatccatactctgcattggacaagtaacaatactaattatttatcatgtttcacaatttgtaatagaattaattaaaaggttaataaagaaaaagttgtaaggattctaacctggaggtatgtaaccaattgagcccctaaggacatgagtggagcttatggaaacttgatttgttgagttttgaatcagcgacctagccaatccaaagtctccaacctttgctgtcatgtcttcatccaatagaatgttgctaggcttcaaatcacagtgcacaactgggatttcactatcattgtgcaggtaatccaatgcacaagcaacatctatagctatgttcagtctctccataaggttcaacccatttccgtttgcgtgatttctcctccccttgatccaatcttccaagctaccattgcacaggtactcatacaccagagccagaaaatcattgtttttgaagtcaacactagagcatgatgtgatcagcttaaccaaatttcgatgccttgagttcttcatagcctcacattctgcaaagaaactcttcaaagagccagttcttagggtgtcaagaactttcactgcaacagtagctccatgacttagatggcctttataaactgagccaaagcttccaactcctaataggttttcctggctgaactcctcagttgccagacgaagttcatcataagagaccattggtacatgaggtttcagctgttcagatgtt

SEQ ID NO: 5296 - DNA, 812 bp, Glycine max
attctatcttttcattcccattatatttgtattacaatattatatattgtcattaacatttcttttcagatactctgtcgtctaaagtcattattgttcaatggttacattagcttaaccaatacttttcttgactgtggctctgaaaatcattaaagagacacatcagtgaagtaaattttaaagtggtcgcctggggttagccttttcttgattaatactaattgaaattctcacttagcaaccaaatattggtcattgtggcttatttattctacacttgtactctgctgtgcaatgtcttaaataccagaatttctttcccagtgcagtgcaagcacttggtatattaatagaagaaagttttggagtaattggtaacctgctgacaataggaactactgtctttactgaatgggtcaatgagttgaaaagtttgcattatgagtatttattcactttattttatttactgatttttatttttttaaatttccttgtgcttaagaagaaaaggtgactgttctggttattggtggagggggacgtgaacacgctctttgccatgccttgcaacgatcaccatcctgtgagactgtactttgtgccccgggcaatgcagggattgctagctcaggaaatgctacttgcatctctgaccttgaagtttatgatggagcagcagtaatctccttttgccggaaaatgggggtgggacttgttgttgtgggacctgaggctccacttgttgcaggtcttacaaatgagttagttaaggctggaatcccaacttttggtccatctgcaggcag

SEQ ID NO: 5297 - DNA, 715 bp, Glycine max
gcgatagtctgcactgcatttgccatttatctcccggccttgatcataaaactaaacgttttccaaatcctttgtcttttagagggagatgattgttaacattatagacacctacatcagattactgcggttaaagtaaaaaaaaaaattgaaatttgaggatattatctggaccagtttttcaaacagacgaaatgtaccctattttgatgataatatagcgcattatttaatagggaaataacctattttgctgatgggttgtttttcttttatactgtcccctgtaaaggtatactttgatcaacttcgatcaaagaaaaggggagggaaatacgagaagtcaatgcacttttcacgtgtcccaacacaagagtggaatcctataatagcgatgatagtagtattattacaaattacagctcgtagactcagaaatatcttattgataaaagtaacgcagaagctgaataatgatgcgtttgtcagtaactctttcccagatggtctgaaactacttaaaaatgaaaacatatgtattgactgatgactactatattgacaagaatgaagaaaaaaaatcagttacatgctccacaaacaaagagtaacattcttaattttcctattctttatgtagctatatatttgatgttctagctgcaagatgtatgagacttttcctgtggtaagcagtacgtagctttttgtattt

SEQ ID NO: 5298 - DNA, 700 bp, Glycine max
atgagcttatgaggcatgcagcagaggcaattgttgttttgtcatcttcttgctgccagcaagttgatgatgtgatcagcagtccatcagaaggcccggtggtggactctctaagttggtttgtggatatagtttcctcgtgtgtggatgatctacagaagaagagtgataattcaagggaaaaagatggtgaggataatgaggaatcttcctcagatggaatggactactttgaatcaatgacattgaaactgacagagaccaaggaagaagactacatgccccagccccttgttccagaaaacttcaaagtggaagaaactggaacaacctcgttacctactcggacacgaagggggccagctaggagagggaggcagcgaagcgacttccaaagggatatccttccaggccttgcatctttatcgaggcatgaagtaacagaagatctccaaacatttggaggactcatgaaagcaacaggtcatacatggaattcaggattaaacaggagaagtggatgtggtaggggtagacggcggtcacagccacaggttaccccaactcctccccctcctccagtggcaaacattgaaacaaacaccccacttattcagcagcttaataacattgaaggggtgggattggaagatagaagcctaacaggttggggcaagacaaccagaaggccccgtagaca

SEQ ID NO: 5299 - DNA, 783 bp, Glycine max
aggtcaaatttagttttttcggatgtatgcaggacgcttaactccaatcattttcgtgaacagtaagaatctcattcaaagaggtttgaatgtcataatggacaaaaggaagtactccaagttaatatggaaagtagggtaaattgggatgaagaaaacgtatcacggccttataaattggttgtaaacgatattaaccagatcgtgacgtatttttttaatttaaggcttgtttcattcaagttcgttttgaaaaaaaaaattattattttttgaaagagtttctgaaaataaaaatattttttaaaatttaaaactgacaatgtttgggcttgggaataaaccacctttggattaattttgttcggtgcaacctcacataatatttgaaatttataattctttaattaagctaggcatacatttaaataatttttttttagcttgagataagactagtattattttgatatggctcatttagaaagatagttatcagacatccttggtgttagtatttgcatttttaaaattttaagaagtcgttagagctgaattgttgatgagagtcttaaataattggtgtaagattgcgtatctaaattttataattacatattcttattcaaaacttgagttgacttagttacaatccaatcgccaattaaagttaacatctagttgagattaacccaaaaaaaaattaagttaacttaaacacgagattaaatgagattgattgcaggaaacttagattcctataacaacggatttaagttagtg

SEQ ID NO: 5300 - DNA, 723 bp, Glycine max
ttttgaataaattgcccatatatttttttaagaaaaatatttttgacaccgtatcaatgtacaaattattagaacaacactgactttgagggaaaaaaaacagatattgtataatattattaacatcattatttagacaatcgatatagaatattgtcaaattcacacatcttgacacattctatattggtttcaagcaaaactcatatagaaatatgtctcccagaatggtttataaattattattgagagtattcgacttttaaagataataatttcattcaaaaccattgttgaaaccttttaagaactttcgtgaaaagatttttttttttttttgtaataatatccacttgattaacctaataaaagtttgacttgaaagaacttgaaggctaaattatatatatatattttatagaaaagttgcatcctctctgtactcaatcctcacattagattaaactgtctcaggaagttttaaacccaattcacatgttattttaaggagtgatctctaattcttagaatatactacaatctcaggtggccaaaaactgacattaaaatgaacctttcggtcgatgtaagctagcttttgtatctcttgactaacttttaactatctatcattctacctcaatttttgacttaaaaagattgaataatgctacaacatattatacatatataggtatagagatatacaacataccttaacgt

SEQ ID NO: 5301 - DNA, 734 bp, Glycine max
agaccaataatttcccttataatatgactcacaagatcgtccttgcaacatttggacatttaatatacatggggaattttcatcacatcacagtagtaaatatcttctttcaaaaaaactaaagtagaaggaaagatgtactggcaattctatatccaagacataacatgcttaacttaagcagcagtattgggatacaaaacttcagatctattcacaaaaaaacatttgcacagacataacaccaaataaaaacaatttcagattacataatggcaaaactctgtcaaccctgagagatgaactcacccatcaacttttaagcaacaacacagaattcctgatacaggtatttggaggctgcttacctgaaatatatagtaaatagcatctgatgagttctccagctgtgagattgagtaatttagtggagatctgtaatgggcactaatcaaaaagtgcctcaaagcaagtggatggtaacgctcagtgatctgcaagaaaaaatatcatgaaagatatgcacaagacatcttgcaagagacttctaccatgcaaaaccttatacaaatatctagaaagaattaaaaaccatcattaaccagaagaatggtgaaaaagttagctaaggactgacctggcgaatagtgaaaaagttgcctaaggattttgacatcttttcattgttattagtgacatgcccattatgcatccaataactgacatggctctca

SEQ ID NO: 5302 - DNA, 753 bp, Glycine max
tgtgtatggatccacaactgtactattaaagcaatttttttttaaatatgtatattagtcatttttctttaattcggtctaagaaattttgaattaaagtaaaatataaaaatatagatcccacgtcacgggacctaaaaattaatatcacattgttaccatagaaaaagtatagaataacaggacatcaatgcttgttacataatctctcttctttggattttgtcttcacaccaaagttggttattgatacgaatgaagctttagtataattgtttgtcatgttaccttttatgtaatttcttgaataacagtgggagcacttttgaatgcaacatgtgggaatgctacagagctcatcatagcaatttttgcccttagccataacaaaattgctttggtcaaatattctctcttgggttccataatttctaaccttcttctggttcttggaacctctctattcattggtggcctagcaaatcttagtcaggaacaaaaatacgacagagtatagccctgcactccattagtccattcagaactttcacctatgaattgcatagttttggttctttattttcttttatagtgaaatatgggctagtgttaattaaggatttgaatgttttgcaattttcttgcagaaacaagcagatatgaacttgcttatgttgtttgtggcattgctttgccacttgctgccattgttgtttcattatgttggtgcctcagcagctgacactggagact

SEQ ID NO: 5303 - DNA, 822 bp, Glycine max
aaggtctcaatgtgttgttattagcattggagtgagagagtgctgctggcaaagttgaagaagaattggaggcaatggtggggtgagagaatgctgtgccaattgaagtaacaagtagcagcaaagcaacaaaagcatgtagcatagtattttgggaagtggaagaaagagccaatttcagggaatattgattttgttgctgtgagcttgtttcttctgtggcatcatgatttgcttgtatgcattggtgttgtcttgttgtgtgatgagctgcaaaaaatagctctttctgatgttgttttgtccaggaaactgaatatcccttcatgtccatacaaaacagaagaagaacaacaacaaccccccctcgttttgttggctgccttgacgttttcaaattataaacaaaacaacttctactggtcctaaccagagagagagagagagagagagagaataatagtgatttaaattttatgctcccaccacactacaccacaccatcaaaactagcaccagcacacaaaatagacccaggccacggataggtggggttgcattttccaagtttatcttttacctctctaacaacaaaggactctgtagacagacactgggataattaaacacgggaaaaagaaaaaaaaaacttaaccaagagttatgttatgtgatgcatgttgcattatggattcttcttgttttattcctctctgttggattttgtactaaataaatagtgtagcattttagttaggcacgcaattaattcgaataggaatataaactgaagcaattacgttggaatatatatctactaca

SEQ ID NO: 5304 - DNA, 808 bp, Glycine max
acccttctaatcagcttttaaactcaatataagagctaacttgagcattagttttaccaataagactagtccaaaatgttttgccactaacaactaatcaaagacatgcgcaattcttttatatcttgttattgaaatttgaaataaaaaatggtagttaggcttttttttataaagaaaaattatcaagtcattgtttaatttaaaaactatgacaaaataaaatgggaattcaatgaaatggtccaatttgattgagtcaagctcagcaacaagtgtggccttgtattcaacaattgcgcagtagcttcaagtttgaacacttcactatgactgagagtgagacagagcacaattcaaatacaacaacaacaacaacgattcacattacaagtacaaccacgagcgtaaattgcacaacaagaagccagagcaacttgatattcgattcgtcgcattactgatcaattaattacgcgctttcttcaattcattgttagagcaacaaacaaaagaggagcaaaaatctatgcttgtataagaaatcaagaatacgaattacagtaatactagtagtatatgattggaacctaacaattaatttgcctaggtggtaacgttcaactttatattacataataattgataattgattgatataaaaataaaaataaaatgttatactaacgctaaaaggagtagtagcgagcgagcccaacgaataggtgacctaattaattgggcggttcggtgggcgaatcgcgattttggccggcaagggacgaccggtcccggagccgccgcaact

SEQ ID NO: 5305 - DNA, 677 bp, Glycine max
ccagcatagaaatgatccggtttgttaattcaggcacagaagcatgcatgggggcgctccgtctggcacgtgcttttacagggaagcagaagatcatcaagtttgaggggtgttcccatgccatgctgatccttttcttgttaagacaggtagtggagttgtcacattaggacttgctgactcccctggtgttccgaaagcttacatccaacaccctcactgccctcttcaacgatattttagccattgagaagctttttgaaaatcacaagggagagattgcagcactcatccttgaacctgctgtaggaaactcaggtttcattgttcctaaacttgagtttcttgataccatacgtaaaatcatcaaggagaacaatgcacttctcatctttgatgaagttatgaccggattccagttgtcatatggaggagctcaagagtattttggcattgttcctgacttgaaaacattaggaaaaataattgttagcggtcttccggtaggtgcatatgggggtaggagaaatattatgaagatggtggcacggcaggacctatgtaccaggttgggactctttttcttttttattgacaaatgttagtttgttaattttgttagaaataatagtagagggattcaaacccgggacctctcccttctcccttctcccttc

SEQ ID NO: 5306 - DNA, 738 bp, Glycine max
aaggaggacccattggtaaaacactaaaacatgggaccataatcattaatatccctcgccaaacttgtgacagacagaacagcaaaaacagtatagaagaccctggtgttgcttcttaagttgccattagaaattttatttgtagaacaattcgtacaaaaattatataactaagagaaaaaaaaaagaaaaaaaaatatgagatataatagatgatgcaatagtcatacgagattttacatcgactagtaagtgtatataagtgaagaacaactcttgtcttacaagacagttttgtggaattgaatttgactcaaacttaaatttaaaaatagtattatagaccactgaactgcaaactttttgtttgagatatttaatctttggcatgaaaaaagtgttttagagaaacatcgactaataatataaaaaaaaaatattcaaattcatattcttagaaccctctataaaaattgtcactgtggaaaaagatatgtgaataacatagctgttctagtaattcctatatctacatggcaatgcaatttcgcagttgcccataataattgtctctttttttcaaagggaaaggagggagaagtataaggaacaaaccaaaatggttcaatttctcctcctctttcttgagcaagatcaaagcagggcgtttaacacttgcatcaatatggaaaagcttcgccacatcagctaccacagtttgataaaaattgacatcat

SEQ ID NO: 5307 - DNA, 740 bp, Glycine max
gtaaatttcataagcgaatgcatgtgcaaatttttcttctacacgggatataaattccttcagccatgggaaaaacggctctaagtagttaaatatacatggccctgccaattgcatatttgtattctttttttcctgctcttgcacttttagtaatacggagttggggacatatctaacgactaacgagcagagaccctagcggcctgcgccactttattcattaatcttaacacagttgcattttaattgatataggatttatttatattttaaatttcatactatatgttaaagtaaaaaagtgctatgaagcattagttaatttttaaataccttcgtgtgtttggatggggtgatttgatagggtaatttaattttttaaagattgattctttgtaaaatatggggtttggataaagaatttaagaagaatttgagattttagtattttaataaactaaaatcttaggatttcaaattccttaaaaaattaaagaaattgaaattctttatgcagttctcggtatgctttgcttctctcacgttgcacgcatgctctcatcgtaaggcacacttacgctctttatgttgtatagtaggatctaatgactcaggttacgcccttttttgatatcaatacctattggttaatgtttatggactaaacaagtttcttggtgatttgaataaatagatgagatttcttgttggatggattctctatgtttttctgatgc

SEQ ID NO: 5308 - DNA, 654 bp, Glycine max
caactaagaaccattcttacacacaacaccacttgcattcagaaaaaacatagacgaatccatccaaacaaagaaatctcatctatttaattcaaaatcaccaagaaacatcgtttagtccataaacattaaaccaataggtattgatatcaaaaaagggcgtaacctgagtcattagatcctactatacaacataaagagcgtaagtgtgccttacgatgagagcatgcgtgcaacgtgagagaagcaaagcataccgagaactgcataaagaatttcaatttctttaattttttaaggaatttgaaatcctaagattttagtttattaaaatactaaaatctcaaattcttcttaaattctttatccaaaccccatattttacaaagaatcaatctttaaaaaattaaattaccctatcaaatcaccccatccaaacacacgaaggtatttaaaaattaactaatgcttcatagcacttttttactttaacatatagtatgaaatttaaaatataaataaatcctatatcaattaaaatgcaactgtgttaagattaatgaataaagtggcgcaagccgctagggtctttgctcgttaggcggtagatatgtccccaactccgtaatactaaaagtgcaagagcccgaaaaa

SEQ ID NO: 5309 - DNA, 757 bp, Glycine max
aaagcttgcataaggcatcaaatatctggttgaagaatataataaaatctcctctcacaacctaccatcaaaacaagattgacattggaggattgtacattatcatattaaaggtttataagggtaagcagaattagatcttcacctttgctatgttgtataatgcttcacaagcataataacgaactctgctatcttgatcggcaaaagaatttaatacaggtggtacaatttgctgtataatacaaaatatgtaggtaagaaggaaaatgaatacacaccaatttcatacttttaggtgaaatcatctattttgttattttaaacctcgtcctaaaattttgaaccatgttaacatagcttaacaaaaagaaaagaactagcatccaaagtaattagcatatttcatgttgataacaagaacagtgaaattatgcctattatattccattcactgacatgcttgaaattgcagttttatattgctttcgttttcaaaatgccttgtgctaaagatgctacaaaaatgaggctaaagaaggttcaaactatggtaaaaactaaaaatctgcttatgaattagaagacaaatagtttttgctgaatattatagcatttccaatattacagaaatagatatacagctaaaatgtaaacacaacttctgaaactgaaaaggaactatttttatggcaatatatttgaaaaacatcccccagggagcttctgacacataggtctgattagatggaattat

SEQ ID NO: 5310 - DNA, 845 bp, Glycine max
gctagcaccagctcctgtattcgcatattctgcgtagtagaggctgctcagaccaaagtttccactccacggagaccaacctgcaatacgagcattatatatattttcagtccttctacactacctaacaatttcatctatttacaagagaatcaccggtatactctctcaatagcaagcagaatatatatatatatacacacacacgaacttatttgtacttttcctttatttatgaaagaaaaaaataatataagataacttgtttataataagggcatgtttgtttgtttttttaagaaaacaaaatcaaattttctttacaagaatatattttgaaaattgtaactctgtttggattttcatagtattctacttttagttttttattatatgatatgtagaatttaataattatgcactagttagtataagtcatcttattagttagtatgactttttaaattattattataaaaattaacatcttattatacataaaacttatcctctctactatatatatatatatatatatatatatatatatatatatatatatatatattctttcttcttctattttatcttctttcctgaacactctggctccctaagaattaatttctgaaaatttcttaataaaataatcttaaaaactagaaaacaaaaacacacctaattaatactgcaaccaataagactatgttctgtatctacactatctaacatacaaaaaagaaaagacatgggatgtgagctttatctaacaagtagacccctcctctcatgattctttttctttcttgttaaacagtgaagcttattaaaaaagaactggtgga

SEQ ID NO: 5311 - DNA, 806 bp, Glycine max
aggaaaatctgggggaacaataatatatcccagttgtggtgttagatacgaatcatatcaattccataaggcacaaatcaggggtagttcggtgacgccgccgccacttcccagtagtccttccccttttgcttcaccaggttaggtagctattattgtttctcattttgcattttttttattcttaggaatcaaagataaatgcaaagagtttagaacaactcatgcaccatgttctcaatcttaatagaaatgatccttggaaatccatgtgctcatctatatacctagagagatagaagagaaaaatgtgtagatgtgatacataattatgatgtaacgggtgtcgagaggtgtttagaaagtcgcgggtgtccatagaatagaaatgattacttgattagtattgttttaattttgttactatttcatagacaacgagagacccagacgcaccaatgattttgtcaaaacagtagggtcagatcatgagattatatcgatcactcatgtcatgctattccccacttatcatgttactatcgtccaatgactttatctggcaaaagatatatcttctacaacaactggaatgcattgagaacgtaccctgacaagtcaagttgaaaaagtatcccgctgtctgtctgccattcattttgcttgttactgtcgaaccaagatctattttctttcccttcatcattcaacagaaattgctcaaaatataattaatattagtaatcccactagttatgagaaatatattgtttagctatactgcctgaatgtcatcttgtatttct

SEQ ID NO: 5312 - DNA, 811 bp, Glycine max
aatacatgttctttgtgttcagcaaaaaccaaatagtaatatgtaatgaagaaagcataaaagttaatgtcactcacggcaatgccttttagattgaatatcttgttctttgtgttcatttcaaccatgagctttgcaagttgaggaacataatgacctgatacatcatgcaactttttcaatgtgtaagaacaaataattgctctaactaactttcttttgaaatggaatttccaagaatgacatgtttaattaccagcatagctttcccccgttagaaacaagtctctgctcctgtattgagggaacttgttgaaccagcgtagcaggaatataaggttgtccctggcttaagaaatcaaacaaaagcactgcttcagttgacaaaatatatgcatgtaaacatctcattattcaaggacagtacaatcatgccaaaataaaaaaaaaagaataccattcttctaatgcctgcgtagagaataagagatgaagaataataatcatgtaaagtgccacactaaagttagcatggaattttaacattgatcactgttttgtctcaactttttttaaaagcctaagaagcatacaaatgaaatgatacgtgccttttcccatagaagaaaaaaaaattcaaagaagctttctaaagagaaacgtttttgtcccaaaagattaaaaaaaaaaagtctaataatattaatgaagaataatacctgttgcctcgtcattcacagtcatataggaggagctacctttagcataagagaaccccactccaactggtgtctccaaatacagcatgttt

SEQ ID NO: 5313 - DNA, 808 bp, Glycine max
ataaccaaaatgttggaacaaatatatgaaaagaaacagaggttaataaccatgaaaaaagaaaaggggtgaatccaacatggaaggaaactagactgcatgcttggtccttcataaacaaaatgtttaccaaaaaaaatgagatggaaaagtagaggagttaaaaagatacaacaaattgccgttaatgtttgcatctatgaaggtcttttattttagttcttgtcacgtagtgtatatgcattttaacaaacaaacaaaatagcagtgtttttttgtcaagaaagaacacttcttgccaaacacaataagcaaacaatgttagttaatttgcaaatatcatcaatacaagaacagagcatttgtatataattgtccatatattacacaaataaacaaatttttttttaaaaaaaacagagatttaaaccatgttattaatacattagcacattctatataaacagatcgatacaggaaacaaatcatacttccttaaatcatattatcattatttgcaagatttaccctccaacaccaacagataactgaacaaagcacaccctctccacataattgatatacttgttttaactttaaccagttacacgatatggcagataacagaaatttatacacccatatattccagactcacaagggcataataccggatagttggaaataaattcaaagcaaactcaggtatcaaatgaagttaaaaaaaatgttttccccctccctcaagcatacctcgccagtattgaccgtaatgatatggggcataaagtttgtaccaacagaatca

SEQ ID NO: 5314 - DNA, 834 bp, Glycine max
agctctgttattatgaggaatgatgataatctggttcgagctattagatgttgatgtatctattgtctgtctttttctgatatgttgttgtccttgtgattttgagccttattttttgttgacatgattcataatagcatattgacatttccaagataatgattataggttcggtttcaaacttaccattacgttaacctcttgtatgatgttatttaattttgagatatcttttatcacctccctcactagattctatgtctgaaactttaagtgtctcatgattgtcttattattatgtcgaatgtgccttttaaacatggctgtactgcaagtttgttttccttattttgcatatatttctagcttcattctcttttgttgaaaatccattcacatggaagtttatataaataatatctaatttttagcttctgaataggatgacttttaaatatcttttttcatacttttctgttttccttttgtagctaaaccaacattgcccacaaatttcgaggaggatacatgggcaaaactaaagtctgccatttgtgctatatttttgaagcaacctaactcttgtgacttggagaagctttatcaggtaatcatggaaattctctaattaattattattatttttctaacatgattgatttagccatgtgaatatttatgttgcactagcttattggtatttcatggtgaactcataatctccattccatataggctgtgaacgatctctgcctatataaaatgggtgtaaatcttcatcaacagattgaaaaggagtgtgaagcacatatatctgctgcgctgcaggcgacg

SEQ ID NO: 5315 - DNA, 732 bp, Glycine max
atagataccaaatcccaaagtgcaaaaaatcaaaattggaccatggaattaatcaatcaacaagcagaacaaatctggtaaacgaaacgccgaaaacaaagtacgaaccaggttgggaagtaagaaaaatgaaacgatcgaaaagataataaagttgctctctagttaacattccactactctgcgtcccagatgccattcgcgacgctcacgaaccacacaagcacaaaccaagagacaagagccacactgtacaatttaggcgaaacaattgataactctattttactttatttttcatcacaacaaaatttcgctttcaaaattactattaataactaaactctgattaaattaaatgaataaaataaataaataaataaataaataaaccatgtgataagctgaaaagtatactttatcatttctcaaggagagatcagagacaaacaaaaagcacataaccctaacgaaagaaaagaaaaaaaaaaaaaagcactataaaaaaagcacataaaactggagtatgtaacaacggtaataatacagtgaaatattatcatcatcagcatccggtcctaaacctaatcccaatcccataataataaattagaaatcctcatccatcttgaagacgtgggtcccaccgttcccgttcaagctgttcataacagaagccttttgatactccccgacgcgcttctcgaagaagttggtctttccgctgcaggc

SEQ ID NO: 5316 - DNA, 837 bp, Glycine max
gcatgcctgcagaatggaaaccaattggtatttgagttgccatagtgtgcttcatagactattgctgttgctgctgaggctccagttgtgagaagaccatacataaccttcaaaagttagttcaaactggacttcattagaaacatttggcagtaacatctaacaagttaaagagttcaatgtttctgaagctctgtctttgcgggtaatcttgcttcaggaaaaagaaaatagtactactgacatgatagtttaaaggcttagttgcatttttgcactcaaagttatacaatcttgtgcaaatttttgctcccaaaatttgttttctcgaatttgtctccttatttataaaatgtggtggttcgaaactattgtagagtaatggtcatatcatcatatggtttaggagggataggttccgaattcgaatcctcccgctaataaaaaactaataaattaataattaacatttacttatgagaagaaaaaaaattatatcttttaggactttatggatacttgatatcatgatataatttgtgacatcttataaattggaggataaaatttttaaattaaaataaaattagaggacaaaatttgcaaaattatataacttggaaggcaaaaggtgtaactaagcctaatttaaaacaataaatttaacatagctaaatagccaacaaataaagaggaagaaaggttaacacattcaataaaaccttcccaagtaaccaaattggtgcctaaatttggaacaatattctatggcttgaaaattcaagaagaatcagtgtgtttaccgtgtcaagaaagacctggagaaccttgcttttc

SEQ ID NO: 5317 - DNA, 774 bp, Glycine max
atacattcacaacaatgagaaattagtgttttggtgaatatttacaaaattaattttaaatggcattgattaaattgattttacaaattagttttgaagtgaaataatttatgtttaaatattatttttttgtcctggatcagagatcatccctaacacactaggacaaaaactaatctgcttgtagtccatgattgttgctgacccaagaaaattgtgcataacagaggacatcaaacacaaattctcttgttagatagatcgttcctccaaatgtgaatacaagggagccttgcgccactacataaccccaataagtttgtattcaggatagtataatttttttatcctatgcaaatgctacttaaattacttcaactaaaaatcgattttggactagaatcaatacttcaaagttggactaaacatgtgaatatttacttaaaatcacattatctgatatttaaacgtgattattaataatctaatctgaacccaaatacaaaattgaatcccgagtaaaaggcagaaattttttttaaattgaattcatgtagttgcttcactgatttacaagtacatacggttttccagtgtagttttggatgaaatgcatgatgagaattcaaagctaagaactattttgaacttatagtactactggattctttctttatagaaagccatttcaaataaactttatatctacctggggtgtattggactttcatcttcatgagacagagccataaaattcccatgtggaaggttgta

SEQ ID NO: 5318 - DNA, 844 bp, Glycine max
gcatgcacagtgattgctatcatagatgcaccttgagcattactatcataacctccaacatgatattgtaaaacattcaaatgtaaattgatccaaagcaatagtttaaggatgtgtttagtttgccttctgaactttgcaaaataggtcctaaaatttttagggtgcaaattgcaatattcaacatacgaattcaatgaaactaaataacacatctgaaagaaggcatgcctcaaaatgaactccactttcccttaaacttgtgataaactttcacaattttaaagtgattccaattgaatccctacatcttctagttccagaaacaattaagaaaagatgccaaagagaaaatcgttgcctatcaaaaatagacaaatcctctatgcttttagaagtctcaaagtgaccaatgagaaaagagctcaagtggcaacagcatcagacttcattttgattcctgttacaaactcctgaccctttccgttgcctcaattcctaggtctacacagcctcccttggaacctggaaaaatctattaaactaatattgtatatttttatgacttcagatggaagttttgaatatgctataggattttgttagtgaaaggaggtcttaaaacctgcaaaacataagccagcatccctacaggcaagagcagtcatcatcatgtgtgaaccatccagtgaatgtacgaagtttggagcaaatgcagatctctgtttcttggcatctacctggaataagagtagttttaataacgaatatagttcagaaagaaaggaaagctgcaaaaaagaggactatgtccactttctgcattaccctctcgtctcagagc

SEQ ID NO: 5319 - DNA, 738 bp, Glycine max
aataacttccttaaatccataacacttccctaaattaccaaactgtatgaagacttcatatacatttattgtggctagtagtttccttttttactatcagattcagatacattctatttatagcacattatacattccttgtaaattgccatattctttctgggtctgttggccttcagacaatagtacaatttgaggaggtactagctattgggtgttttatgaacttgtaacatttaccaggctattgtggataactatccttaaaagctacatatttgtgacttttgttaattgttgtctggttattctttcgttgtaagtaaagcttcaaaatacattctgtttgtgtttggccttttgagctcttggaggagagagagtagaaggtttacaaggcttttttttctctccatgcaattgatttggtttttctactatttggaggacctttgagatagaaagcatgaaatgcttaaagtcaggggaacatacttttcctcttcattaatgagcatgctgaagttttactccattttttactgttgtcatggtttctcttaactttttcatgattgtgtctctcttgttcttgttgctctgcttttggtataccttttgttatttgaaattttgaaaagaggaaacttcagaggtgaaattatcttcagttttctgcaagaaattgttatttgtgaatcagtggaccttggctaacttacctttttttttcctctt

SEQ ID NO: 5320 - DNA, 764 bp, Glycine max
ggtaggtaattgtcacctctaataatttaaaccagttctttgttgcatttatttttataatagacataacataagcatgtttgtctgcatatgtgcattatatctgtttttagcaatgttgaagttggggtaagcatccataagcagaaagagagcgggagatgtgtaatattatggtagagggtttggagcatccttagatcttattgaacctgaaatctaagtattttgtgtcccataaacaagaatctttaaacttcgaaaggaactttgggttcacatgtaattggttgttggcaaagaagacatgtaatgttgtttttctcctatatactgttttatgattgatttggctttatattcataattcatgctgataaaaaaaaatattcataattcataatgtaaccatttcttgcgattatctcatcatggttaaagagagactgttttatgttgttagaagctatgaagtaccgacactgacacggacaccggacacgacacaattagaacaaaacttaaattcaaaatcatatgtaaaacaactaagtcatacataaaccaatcataagtacaaaacagtccaagtgcagcaatctgacaagtaggataacagaagcagagcaaagaataacgaagttataaaacactcttataagaaaataaaagagaatcacagagatgagaggaacgaacagagaacccacaagctttgtagttgcagcaaacagagaagccactttgaaaaaacccactagagt

SEQ ID NO: 5321 - DNA, 717 bp, Glycine max
agctaagcgtctgacccgctactaactgaaatcttcaaaaaagtgactcctcccaccctccccactccttctccctccctaaaaggaattacaaatgagtgtaactaactcacacctcaatttctctttatgccctcatgctcatattattttttatttcttctgctgcatcttccaaagtcgtggcccataactaatttgaactgggctaggtaatttgtgaaacctgactttgtctcatgaaaaggaagtattaatttacatatatgatttactgttgtgtttgaaacgataaaatatttgggtcttttgtaattctactagtagtgttttatatagtaactgcatttttgtttttccagttatatgctttttaacattgatggtaagcaagttccacaacagatggtcattgaagttggagacatctttaagaaaattctggaagaggtaagaccttttcactttgcagcatatgacgtggtatttttcaatcataaatgcaattctaattatcttaatcttgaatctaataacctgatgacgacagacagggaaagtgagggatgagcataccgaggacatttcagtttcccaagctatttcaattgtgctagataggcacccagaactaaggtatttaattgagaaaagaatattatgttcaaacgttgaggccttaagttccaatatagtgctgtaattgacaaagttttt

SEQ ID NO: 5322 - DNA, 798 bp, Glycine max
actataccgctgttaaagatattcaatccttgatgtgaggggggatgtgttaagagatttcacgtagtgtatataagtgaaagacaaccctcactgcatgagctaatttttgtgactgagttggcctcaagccaaaattctaagaataattgcataaatgtagtacggactctggatctttcaagaaaatacatgcttggtgattgcttttacaagaaatggaaggtgaagattactttagaaataaaaaattgggggatgtgttaagagatttcacataaaatagtaatatagtcaaaatggtgtatacaagtgaaagacaaccctcactgcataagctagttttggtagttgaatttgcctcgagccgaaattctaagaatgatttcctaaatgtagtacagactttggatgttcgaagaaagtacatgcttggtgatagcttttacaagtaaaccgaaggtgagcattactttaaaaataaaaaattgagtctgtgactcttttgcttttgtctttcgaaaaagttgcttccttctgttttactcattcgttgttggactaatatgatgagtcagttcacagtaaagacatgtcagtgatctaatcaatcaggtttctagtttgatatagaaattttggaatgtaattccttttccttctagttgccttggagtgtgtggttaagtctatgacatttttgtgtaagttcggacaaatttggaccttcctttgtatgacattttaataccaattaatatgctgatcaacactattgataactgcaggcatgcaagc

SEQ ID NO: 5323 - DNA, 632 bp, Glycine max
aaagcccatcatcaataaataacaaggccctatagttcatggccactgcacactcactcactcactgcctctttttcttcgtattattttctcctctctcaaacagagtaacctctccaatgtccaatccaatccatcaaagcatttcataatgaacaaagatctatgccactagaccaccacctcttcttagaagaaattaaaatggcacatcgttacccaaaacccctcttagacaccctctactgcttagaagaccatattcattgggaggaagaacaagtagaagatgatgagtacagtagtagcacaaccacaacaatcacaaacacaaacacagacacctcctctgtggtctttttagaacacgacctcttctgggaccgcgaggagctatcttctcttctcgccaaagaacaccaaaaccaactctcgaatactctccaaaaaaacctcgttttagcctcatctcgacaagaagcagtggagtggattctgaaagtgaatgcccattattccttttctaccctcaccgcggttctcgctgttaactacctcgataggttcctcttcagcttcagattccagaacgacagcaacaacaattctttgctcacacaactagcccgcat

SEQ ID NO: 5324 - DNA, 801 bp, Glycine max
acagttgttcataaaacacacgaaaaaaatactccctatgttaagattatggaaattcattaatatttttattactcaaactaagttttcaaaatattctctatatataagataaagactttcaaatagtctaacacattaatgtattctacttatattatttatttaattcagaaaatttgttaataattaagattagaatcttattaaccattatttttaaggtattagttaagaaaataaaaagaaaaaaattattgtgcaaatcatatgagagtataaaaaagattatggacaatgtaatttcttgtctcttaataaaaaatatttatattttaagttctttaatccatgttcttaagttaccggttaacatttgtcttaataatattttataaaaaaataattaatgaaagagacattttagattacttctcataaaatctctcttctaatttagatcttataagaaatatgaaagtagtaatattcattcactccattttgaaagaaatcattaggtagttatggtctaagaggatagactcaatcaatctacaaatgaacgtttaattcgctaaagtcaatgaagtgatgcccgagaggatagtataacaaacgaacgtttaattcgctgtattgcacggtcattttttcaatgtgtgttgcagttgttatccaaaaacaagctgataaaagaactattatccaaaaacaatttcaacaagatattaaagacaatattatataattatattttaagttgatggtccatgattttggaggagtaaccgttgcttt

SEQ ID NO: 5325 - DNA, 724 bp, Glycine max
ttgacagcttgctatgcctgcagtgcttacatatgcagtcacaagagtgggaaggcaataccccctcccccgttttttctatttagtgtggttttattctcttgtacattcttcagtgtactagcctacaacattttagttttgaaatttaagttcaacttgcaaatttttgtggtccgttcaaaaattataatgaattttgctgatttatgtttattagactggtgcaatttcttaatggatttctcttgtctactgtttcagctatgaagcttgggtcatttataattttctgtcactgtgtctggcatgggttggtggtcctggagcagttgtaataagtttgagtggtcgagttctgaagccatcattttgtctgatgacttgttgctttcctcctataccgctggatgggtgggtttgtatctgattcatatttttggatgtgcctgaagatagttatgtattccttgaaaactatcccctgatttttctctatggaggttttttttaattacctaactttttgttagttgaaagtactaggatgatacatttgccacacaatatggagatttatttttatggattattggaaaacgacctagacatcctggagatgcaatggattttagtagacttctaacatggtggcatgacattatatcataacttatattcttctctcatttctagaacttctatttcaggcgtttcatacgta

SEQ ID NO: 5326 - DNA, 742 bp, Glycine max
ttggtggatgattccacaatcacagcatctgaagttgatgctaatcagaattctataaactttttaaaaccagcatgtgaggttactgaggtaaatgtcatttttttattgatgattatattgattcaatcttaacatgtatttgtaacctatttttccttaaattgttttcaattttagggagatccagtagactttgagggggtcaataatggtaagttatgcgcactcacattgcttgtctgtgagaaaccactcttcttcatcttggacttgtacaagtcacaatgtgagtcatcaattaaattttgtttgattaattttgtatctctcacgtgatttaggcacaacacaaccagttcaccatgctaatgctgtagaaaatgaattgaataatgtggctgctccatctccaacttgctcaaccatagataggatgaaagaacaacctaaaaatggggaagattcatttcttgatagcaacaaatgtttggaacttattgacaattcaatcctagttggaatggatttgggcttcaaaagttcttcagatgataagattgcaataattcagagcaactttgatttaaagtcaaacttttgtaaaaaacaagaggtggatttttttaatttgctgtcttgtttccatttaattctactggttaagatggacatgatcaacttatggagggaatacatttcagggagtatctgcaggtcgactttaaaggattccccgggt

SEQ ID NO: 5327 - DNA, 696 bp, Glycine max
ttcatctgttcaggtatatattgcttgctcatttttggaagatttcttttttttccagtttctttatccatattagctattgtgaatgtgtgtgtcagcctgccagtaatcctcctacgactgtatcaacgtcaaattccacccctccttctgatcctccagtgcaaactcagtgagtttatcttttttgaggttgatttctatatcagctgggttttttccttaattatcttatctggttttgcagagctgcaaacaacagtacatctagcacagatgccccaactacaaagtatggtttttgtctctacatttctcttaaagatacagttaataaattctactgaagtttttattcaggatgctacaatgtactcccataaaatagttactgagcatgaaatggtgaattatcatttggatctttagtgctacaatcaagagaaaaatgtgtttgttgtaatttaaatttaatcttttccattatggtttttctttaactcatgagttttgagatactcataattcttttaaccaaattaattattatgatgttgacattttaatactagaagcagtgtgggtttaaatcaaatatttttactgaatgctctttgaagctacattggttattacactaatcatttaaaataaaattgatatatgctgatcggagttattatgccatataggttt

SEQ ID NO: 5328 - DNA, 684 bp, Glycine max
acacactgcaaaaatgtatagccaattttagaaagcttgattaaaggaaaggagacaatgtcaatgacaaacaactcaacccaaacatgtttacgaggaaaaagaatgacggcatgatgattatgttaagcaaccacaaaaaaactatatggcataataactacgatcagcaaatatcaaattttatttaaatgactagtgtaataaccaatgtagcctcaaagagcattcagtaaaaatatttgatttaaaaccacactgcttctagtattaaaatgtcaacatcataataattaatttggttaaaagaattatgagtatctcaaaactcatgagttaaagaaaaaccataatggaaaagattaaatttaaattacaacaaacacatttttctcttgattgtagcactaaagatccaaatgataattcaccatttcatgctcagtaactattttatgggagtacattgtagcatcctgaataaaaacttcagtagaatttattaactgtatctttaagagaaatgtagagacaaaaaccatactttgtagttggggcatctgtgctagatgtactgttggttgcagctctgaaaaaccagataaaataattaaggaaaaaaaccggctgatatagaaatcaacctcataaaagataaactcactgagtttgcactggaagaac

SEQ ID NO: 5329 - DNA, 802 bp, Glycine max
tgcatgcctgcagtaagattcctctgtaatataattcgtgggtgtatatgatgtttatttctattctgatcctttgccaactggggaaaaaacaagagattttccttattgggtcaacaacacttacctttgtaagaattaatggtttcccttctagaagatcaagattcaagaaagtatatgtcagcatcaatggtgatttatccttgttttttgttctaaaaattaggtttattaattcatttatcatcacttcagtaattacttgagctctatggtgatcgatctttttttttttttttttatcagcaaagatatatatatatatatataaaatctgagtaccagaggttctaaaatacaaagatttggttaaccatacatttggttccaaatatcagactaaatgaagtctagataggaaccaaagccaggccacaaacatggtagtaatagctactgttagtctatgtttctatcctctgctaatacacaaaccctgctctaagattgctagaccattgattaaaatgaattgaaaaatctttctccaaatttctcagccatgtccagagtaagaaagctgccccatccatcaatttgttgtttggagaaaattatcttgttgctctgttgccatatagtccaagtcaaagccaatcaccaacatttccacctattaacccttatcccatcagccattatggatccatgttggaggaaatgatgtcttgggttttgcggaaaaacacctaagatgttcacccaagacaaagattttcaccaaataggggatgatttt

SEQ ID NO: 5330 - DNA, 757 bp, Glycine max
taagtttgcttgtctacaaacaacctttaaaccaactttacaagcaacccaaaaagcaaatatattaatattaaaaacaaaggaaaaatctcagattctagcattaattaaaattataacattcatactaaatgaatgccaaaaaatttcgtcattatgacgtatgtcttagctcaagcatctctgtagcattatggaacaatagctcaaatatatatagaacattggtgacacccacttttgcaacaaaaccatggcatcactggtttcacacttgcgacttttagtactcctattatcagtttcattgggaaattcagcttcactccaagaaaattttgtccaatgtctcaacttgaattcggacagaacattcccatttaacccactaatttacacaccaaaaagtccttcattcaccagtgtccttgactcctccggcaagaatcaaaggcttttggtgccttcaacaccaaaaccaaagttcatattcacaccaacccgtgattcccatgtgcaagcagcggtaatctgctccaagaaacttggcattcatcttagagtgttaagtggtggccatgactttgaaggagtctcgtacgtttcagaaattgaaagccccttcatagttgttgatttgatcaagctccgtgacatcaacgttgatatcaaaagcaacactgcttgggttcaagctggtgccacaaatggtgaattgtattacagaatatatgagaagagttcacttcatggtttt

SEQ ID NO: 5331 - DNA, 748 bp, Glycine max
atttaaagaaaaatgaaatgaattgaagttgcaaacttttttcctatatttctcaattctttttctcctttttctttttcatatcaactttagatacctgagattatgttgttttacccagcaatcagtgatgcatgagaaggaaaagtagaacatcttttgtaagaatgaaacaacagtgttttatcatgattcataatcgtaagatcttcaagcatttgctattaatgaggctgttgcaaattatatttgtaacttgactaatttttattctaatttttcagtaagtccggtgcttgtatacatatcccaggatttcctccaatgaagacagatgatcttcctgagtcaagtttgctaactgcattgaatggagcaagatttgtctattttgataggagattgcatgagactgctctagttgttgcacatgaggttattactttcataaactgattttatcttttgttgtttatctagagcttcctgatattcatgttttgtcttttaattgtattgtattctgaaatatccatttagtgtcttttagtttattttcttcttctggtaaaaaaggttgagaatgagagaagagagcatcatctgatgggaactaaacaaaatctcattttttccagtacaggcagttaaggagaatatacctatcttaatggatgcagggaggcttagagaagggttggatgatctcgtgaaattagctgattatgtggtgtgcgctgcacggttt

SEQ ID NO: 5332 - DNA, 739 bp, Glycine max
accattgctcttgtccttgtattttctttcatattattcttctgttgttacagttagtagtagcaggcttatgttgctactttcttctgatgaatgaagaaggtattaggaatggtgaacaagatagaatttaattaccatgtccttctcaaacatttcagtagaatagtgaatttctgccagacgaggaggtggagtagtcaatcgagcaggccaaggagccaaaccacttccttttgctttgtgcatttctgcacagaacagcagaatatatgattattacatacaagagttgttaactaatacagcaattgctagtgcaacatgcaaaaaatgcagtagtatcgtcatatatatcatatcagatagaacatggacctatctacaatggccataacaaaagcaatttcataaggtaaactattctaaactgcataatcatgacggagttcttatatacaatcacgttcatttactcttaactaccacttgtgagccaaagttaaacatattcatacatatcattaactatgtctgggtggacaattcccattgggaagaatattattactcttgatgatctaagaacattttcttcagcactatatgtcatgatctagcaattaaaaaaatgaaatagagaaaatatcactcacgatctgaataacgtgaaatgcaagctttcattttaactcccaaaacagcatcaggatcatcatcagatctgcaggcatgcaag

SEQ ID NO: 5333 - DNA, 830 bp, Glycine max
attaaatagagatcaagttgatgctgcttgtttaaaagaaagagattaggtggcagtgcttatgcaagtaaccagtataagaataagattggtatattggttctttaagattaaataatatatgcattcacagttttagttttattttatattgtcatccaatcataaattaatatatatatatatatatatgtggtatgttgaataattatcttatgagtcatacttaccataatttctgattaatcaataatataatttttttaaaactaacagtacttacaaattaaacttgtgttttttaatgtatgataatttcataatgaagaccatgctagccttataagtagtattttagacttgggttgttacttactgactgcatcaagggaagccaacagcacctctccagggagcatctttaggaatgcctgtcctggttgggatttcagcacaggagtcatcattgatccactcattattccaacaccatcaagcaaagatttggttaacttttctgtcatatttgtcagctttctcactctagatttcaaacatgaaaaataatctcaatcagtttatagttgtatatatcctcttaaaattatggagatgaaaaattcatggataacactattatccttaacattaattcatgatctgtagagtatactccatcacatcacatgttcagtatgtattatggtatgtgtggttatgtacagagtgaattgttaaataccgtttgaggttttcgttcgttgcattattctttgtggcatcactcctgtggttcatactttctgtgaccacgctaccattgttctttt

SEQ ID NO: 5334 - DNA, 781 bp, Glycine max
tcctcctcctactttgcagactgctgatacttcaaaagtacctggtaattttttttagtatctgggaattttaaattgcactaaaagaatcattagtttgcttgtgcttattttaatatgggtcgtgatacaaatcttaaactcatcatatttgttgagctatttgcttgtgttgactgtgccagggcatcaaatgcctattgtcacaactttgacaaggcttttcaatgagacatcagacgcccttggaggttcacgtgcaaacccagctaagaggcgggagatagaagacaactcgaagagacttggtgggttgtttgccaagttaaatagtggagacatatcgaaaaatgcttctgacaagctccttcagctttgtcaggcattagacaatggtgattttggtactgccctacaaattcaggtaaatcaattgcaaatgcaaattatagtatttacctgtgtaaaaaactccatcaaatctacattctagcctctttttttttttcgtgttgcaggttcttcttactactactgagtgggacgaatgccaatcctggttaggttcactcaagcggatgatcaagacaaggcagagcgcgagactaggttaaaaaagctacagatttctttttgctgattttggaaaattttcgtgtgattagcatcttgcagtagtgattgcctggtcctcgtatcaatgtacacagactactgccatctctagatttcaggtgcagggtttttgattctatgtgcttctacaattttcttgctgtgt

SEQ ID NO: 5335 - DNA, 647 bp, Glycine max
aattagatacaactttccaacatgtggatcataaagaccctccagaaaaagcacagaaaaactataaccttttccagtaagactgagctgcgcagatacatttataagaagctgtttttctgtatattcagcagccttggcaagatctggtgtttcctgttcagattccgaagtatttttagcattccaatagtgcccaaacaaggaaccaatggagagaatttccatttgaatgtcaattcttggggccaggacattaggcacagggtcaggaaaaccagagacatgaaaagtgagatcttcagaaagaacagacaggctatctcggtatgcctcattatcttcaagtttgggaaatgtcagcaatgatttcttaatgacagttgtaaaactaaagggctcatttttttctaggacagtgccggccaaattaattttagagtaactgtaatttgggttagtgagcttgaaataattccagagttctgaaggtagcacaagttgctcaaatgataggggaaagaaggcactactgttattaatgggagacaaagttcccaaaataatactatgctgcttcaaggaaaaagggtaggaatatacatacagatccgaggtttacagctactcccttagcatcaacgaat

SEQ ID NO: 5336 - DNA, 725 bp, Glycine max
aataagaaatggaaaattacgagtgatgagaaaaacctgataattacgaagggaaattgagggcaactgatagtgaattagaaaatatactatagagattttgcattggttcctttttacttaaattttcagtcataagttaatgcatatcgacgaactggtacctcatcataatgtatgaactcaataactgaatgatttaccaggaaatgcttatggtttgctctttaaactctttaaggcatacttaattggagtgacactgctcaatttcttgggaagggatcattttcttatttatgaagcagtagaaaggtagatgtttctaattgtaggagggtcataggctggttttgtaattagtttgatgctagaaatagacaacctcactgccaccaaatgactagttggagatgatgacgacaatgtgttgttttagtagacaagatgacctaattaagcattatatggtaatgttttgtctcacattttctgttattgaaataatgtacaattggttttgcaaagccgcaagtttatggaatgaaaaaaaagaaaactgtgttgacaatctattatgtatagagcataactcaacgtgctgaatttttctcagaacggtgctctttcaatattatacacacacacacattgtaaagtgcttggcaattttggatgctttattctataatttgtatcagatgtgttttgaaagtttgatgttg

SEQ ID NO: 5337 - DNA, 820 bp, Glycine max
acttaatgctttacttgacattgatttcacctagaatcataatttagacataaatttgtcatctataattccaagcatatagcaatagaataattaaggggaccttttcactctttaacttgtcaaatccagataaaatgcaggtaaacaactaatcaagctagcatcagataaacttctatactgaccgcattaattaggcgttcaagaggctgctctgtaacagttgacttcccagaagtggcagctaaagcattaccatgtgcaccatcaggagcactgaattctgccaataaaggagaggctgatatcccaggagtcccaatggcaagggattgtgctggtgctattgcaccccctgtttgttgatgtccaatatttgcagcatttgatattgatgaaacacaaggaataggcttctcagattctcctggcataggagatggagccaagggaggtgaaggggtaggtcccacaaagggtgaattagaagattgcagaggagttgtgacttttgctttggatgggagatgattttgttggtcaacctggggagatgagtgttgctgaatctgaggagatgcagcctgaaggagttggggtgaagaaacaggaaatgcactcccttgtttcagctgttgatgggaatatgttgagtgttgacctgatgtaagatgctgctgaaagacacctgacttaacacccattccttgtcgcatttttatatcatttatatcattcatttggtgaagttggggcatttgatgtgtctgcaattgtgaagatagctgtggctttgctggatggtgtagttgctgct

SEQ ID NO: 5338 - DNA, 774 bp, Glycine max
atgccatgtctgcgattttgttgaaatttgaaagttgaagggtgggaagggaaggttcaaaaatggatagatgccccaagggcgcgtgacctaatcaattttcaaaacacaacccccgccccccttctctttctcgtattcaagataaaattattattattttaataaattaatagataaataatctaattccttcctcacatgtgtcaaaacttgacatgaaagatcaaaactataaattaatcctacatataatttagacaatttaagatgaattgtatgactaagattatgttcactaaaactaattaaaaaattaattggaaattgaaaagttagaaagttaaaaaattaatttattagattataactgttaaataaacttagttattaaaataacttaaaaatataaaataaataaaataaaatcatgatttatttttaaaaaagataacagtaaatatattaaagataaaagtggaagaaaatataaaaaaaaaatataagctagaaggttttaaaaaaactagtaacatttcaaaaaatactataaactattaaaaaaatttactaaacaaccaaaaaaaatttgggcatggacttgcttaagggtgtttaggttgtgaatttttcatctcatcgaggcatcttatttctttaatatatatatatatataatttttattataaataagttatacaaattaaagtcaagttttttatttttaaataaactaaactcgtgcttcaaattactaattcaactagaaaaca

SEQ ID NO: 5339 - DNA, 804 bp, Glycine max
acttctatgcctgcaggacagatcacgaatactaacgcgcattgctgatatgattgagaaacactgatgagcatgcaacactggaagcatggaatgatggcaagctttttgaacaggcagacaaagttgaattaccattggtcatgcgtctgcttcattactatgctggtgagagagaccagtgagacccatataatatgtttatttatgtacttatttatgagtaaatgttgtatgcattgacagtgtaaagactttttacactataattcaatcgtaaatcaccatgaatgataagtttgttgacttttataataactacttaaaaaaagtcatatcaacaaggattttagatatgtatagaaattaaactttgttcattcagatatactcaattatgtgatttttatgatgatttccgtccttcattaattcaggttgggcagataaaattcatggtctaatggttccagctgatgggaattatcatgcacaaacattgcataaaccaattggggttgcagggcaaatcatacctttgaactctcctctatttatgttgctttcaaagttggtcctgcactagcatgtggtaatactctggtagtaaagattgcggagaacgcacctttgactggtttatttgcagcacagctatttcatgaggtaccattaatgttgcattggattttaagaaacattgataatcaatgttgcattggattttattctatctcaaatgcatattttgtcactggctggtcttccaccaggggttccaaatgttgtgtctggttttggtcc

SEQ ID NO: 5340 - DNA, 749 bp, Glycine max
agaagtatttcatttgagataaaaaaaaatgatattacaaatatgtagacaagtgagaaccttttcttgtgtattctgttttcattttcaataataaaaaaaaaaaggctttgaaacatgtttggtccagtttaacaaaaatatttcacaagacattataaattcatttactgtttaggagttaaaaggcacccagctgacttaatagttaataactaaagagtttaaacagatcatcacagtctccccgaaacaaatccccaataagtcctccttagacacaatcaatggcctatagactaatccaagatatccaccagtaatctggaatatcccacatatccaggtgatgactgcttcaataccattttgtcacacctaaagcccaactaagcataagacaaatcttcttggccaatcacattgcctaaaagactaatctgagttgttttattagctagtaatcagtgctagtcattagctgataatcagtaaagtctaatccatgtaaacacagatgaaaatgcactttatcatctcatctaacaggtcctaagcataatcagcatttaaatcaggactactgcatcaaaaaataaagcatgactctaaataaaacaaaacattgtcaaaggaaaagaaaatatttacctgtgtaccagcaaagagcatatcattattcacaacaagtgcataaacttgtccaacaggaccattaagacttagctctgataaattttgtgtgttcc

SEQ ID NO: 5341 - DNA, 782 bp, Glycine max
accaattgatagaaattggataataatgactgaattttatagaaacactttgcaggaattattctttccaaaacagagacagaattacaacaattagaatcagaatattcactcaaacaagccaagatttcgagagcttggttctctccctcccaaggtctaaaccacacatcttcaggataaccagaatatgattctatttttcttcttattcaacacatacccataactgcctaattaaaataactgttcctaataaactgctcctaataatagtaactgctgtcctattaaaactaactgctaactattcctaataaactgcccctaataatagtaattgttgtcctattaaaactaactgctattgatagcacataacaattatttcccccccccccccccctaaacattctttataagaggtctaacagatagcttccatatataaaggaaatgaacatgaagtaattcacaaaaagcaagtggtcgatagtacctcccatcgcagtgtcctaattgcagctgtgaataatgaaccataacaaatgctcccaaaagaagtcgttaaagcatattgtagacatttcataaaggagttagcgggaattgatacagcctctctaccaccatggatactaacaagaaccactgtcccagacactataacatgcacagtgttgcagagtacagcacctgtccaaaataagcttatagagaggacctgcattaatgatgacaatatcagtgtaatcagattacacaatctgcaggcatgcaag

SEQ ID NO: 5342 - DNA, 815 bp, Glycine max
ttggttggattgcccttcatttggccaggaaatttattgcatgataccatcgaaggttccacttggtgaatcattcaatgactacatcattcctggtaaaagatactcatttaaacaagtgatacatcaacagagagttttagggagaaaggtaagtagactttattgaaaaagtttaatgtttcacaatactttaattgttgaatctgtttgctcttccttttcatttaatttgaagtgcaagagtgatctaaatgaaagggatttctacattcttagaaaacaagataaaagagaattatacaatctatttttttttaatttacgatctttgctaattctcctcagcagtatagtatacattgcatcctggtttgtatcattttttttactttctctttttacaattactctattgtgttgccttgcagcttggtctggtaattgatttgacgaatacttctcgatactatccagtagcagatttaaagaaagagggtatcaagcatgttaaggtttgtagtgcacctttgctcaccaactaattcttttaattatgtctttaaaactgtcactcctctttcttgtccttacatttgaagatcattgttgtgatttagattcaatgcaagggccgcaattctgtacctgataatttatctgttaatcattttgtctatgaggttcgtttctttcttaattatattgttgtaatcttcccgagttatttttaagaatatggcatatatttctttttgttgggtaggctagcttgttattctttgcatgattaagcacacacattacctcatcaa

SEQ ID NO: 5343 - DNA, 783 bp, Glycine max
gcatgcctgcagctgcaacagcagctggtaagttcaaagaagaaatcattccagtttctacaaaggtaggtaccaactaccaaaatgaattttcctatagtgttaataatgctattctactaatgatttgtttacaaagtttgtggaccctaaaactggagtggagaagaaaattgttgtttctgtcgatgatggtatccggccaaacacaaatttagtggatttggcaaagctgaagcctgcattccagaaagatggaaccacaacagcaggtgctaaagaaatctttttcattaactttgttagtctgggggaaatcttctaccttgtgaatatgaatgtatttttgtctctcttttttcaatttcagggaatgctagccaaattagtgacggtgcagcagctgttctcctcatgaagagaagagtggctgtgcaaaaggggcttcctatacttggaatcttcaggtacacaataataatgcatcgtcaaagaaattatttttaaatactagtcacatcaaatgtgaatctagacacaaacctgcatctgtcctataatgtgcacaccacctgcatttagctcgaagtacatgttttcttgtagtccaactcaatgtctatagaagctgcactttcaactagtaatttgattaattttacatcaaattagaagaaagtttagaagtcaattcagtttctgaaagtatgttttagataaacataactactaacaaaacaggcatgtagatgtagggcttctgtacaataaatacttacattt

SEQ ID NO: 5344 - DNA, 723 bp, Glycine max
aataattaccttcgcatctgtcgaggatcaggtctaaaggatggaggaacagcaattatgggtgctggtccacccatatgaggaccagatcgaatcttccttcctgaggcatcgtatgacgaaggtcctccttgctccctgaacatctgcattgcaacttctggtggagcagggacaaagggtcctaaaggcctgtagagatgcaaattatacaagcaccaacaaaatctcaattgaagaaacaaggcggatcagatttggtagatggagaagaatggaaagggaaactaacccagcaccaggtacaggcatcaaaactggcggaggggccatatctgaggtaaattgaggtacaccgggccctccatatgcatcatacattgcttcatcatgatttcccatttgcctttcatgggatggggaaccatcaggcctatctccgtttattctgtcactcctgtcctggtctcgccggttaccacggtcatccttcaatcggccctctaaacctcctaatcttcgcttaagaggcctatccttctacaaacagaacaaaaaaggactgagcatttaaaaatcaatctataccaacattgtacagaaatacattgctatgctaaaaccataatacatcaggctactagccccatagacagagcagcacacattgaaaggaaatactatgctgattccacaagcagtacagaccccatgctgcaggca

SEQ ID NO: 5345 - DNA, 1596 bp, Glycine max
cagcatttcaagcttcaactttttaacatatgatggctcattatactggcaatagaagtgtttgtagtctgaggaaaatatataaggtgctcgcatgaccaaaatatgcaggtgacttaaaactgcataagattgttctggacttcctgagctcacttgagttaagagaggggctttgatgcgctcatatacctaacaagaagaatgtgcaacataaatcacagagaagcaaccaaagctgacaagtctcaaggcaaaataattcaagatcaagaaaaaaggtttaaataataacaatgatagtttcaataagtacgtaaccaaagggaattgtcatgagttatgactgaaggtgatgtaacatgttgacatatgggtaagggcaaagagggattgtgtaggctataacaaacttgcatatgtggcaacgagtgtgggaagcattgtcaggcttcgtgggatataagggaaaagaggggtgggctataatcattgggatagttttgggtggctgtgccacagggcagagaagaataccttctctgctatttttctttcttatatgagtccatatatgaatatcataagcctaatctttcagctgaaaaacctaaatgccaaatatatgtcctctgtgaatgattgagcaagataatagttaaaagtaaaatcattatgagatacaaagcaagcacgattcagaccaaagaactttatgttaagggaaaaataacatgtataaaaaaatgttgcaatgaaaaacaagattaaatgagatgtttacacacaaatcaaagcatacctgctgatgcacatcagccatagacaaagtcgacctgcagtgccccaaggccacatatcccaaattaaacaaaatacaaaaactttatatataaaaccctaaaaattatttataaatacccaccctccacttctatctcatttttattttattttcttcttatctttcttttcttataaatcatatatcattttatcacatttataattttttctctccattttttttcattcttcttacctctcctattactactctagtccatcagaaatttaggtagacgtttatcagttctctctctctctctctctctctatatatatatatatttctttcaccaaacatatataacatatcttgagataaactctatatatacatatatctttcaccaaacataaaacacatcttgtactaaacacacacacatcctactccccaaaccctaaatcagaagaaaaagagaaagagcaacatcataacatcacattcgcatgtgcttttcctaaccctaaaatctccatcccgagaaaaagaagaaaaacaagaagaactttaacatgtcagctgccgtggccgccgccgcagccgccgccatgtcagtgtaccagcacagctcctcctcgagacaagaacaacacagagaccacgaattgcccttaacaccacaacgagtgtgtgtgtctccacctctgagccggtacgagtcacaaaagcggcgcgactggaacacttcggacaatacctgaaaaaccaccgaccactttgatttatcgcgctgcaggcagcaagta

SEQ ID NO: 5346 - DNA, 832 bp, Glycine max
aaaaaaaaagagccaaaatagagattcaggctaagcagttgatggagaaaggaagagaattacaaatgtgattactcattctcattaaattcagaggctcgtctaccacaaggaataagtttgaaacccctacaacttttgtccttcccataaaatttagttgttatggtgatagcaaatttgctcagagggttaaccaatcatatacgaaggccacgacatcaaataatgaacaacagtctatattgtcagaagatattaacaggaaaaggcagaaccaggcaataaataattgtttctagaaattggctttagcagtattattagtagaatgatcagcagatataattattagtagaatgatcagaagatataagtacgggttctttccctttaactggacccctctcaccaaacaatggaataaagttttgtgctgtagttacactagaaatgtttgagtatgaaaatatgcacacaaaaaggatcctcagccttagtttgctgagagatgtatatatgtgtgtgtgtgtgtgtgagagagagagagagagagagagaattaacagatagtacaaaaaatagttcatgatgaagactacagcctagcctatggagacagattacaggacagcttctatgagcttctacaacaagctagaaatataaaacattattaaacaacaactttaacactccccctcaagcttgagcatataaattgtgtgctccaagcttggaacatataaagtggatttgaggacctcccaaggacttggtcaagatgtctgcaagctggttgttggagctaataaatccagtactgatttat

SEQ ID NO: 5347 - DNA, 818 bp, Glycine max
tatgatgaactcggagcaatttgtgatgataaatttagaaagtggaaagatgaaaaaagagggcatgtattggcgttagaggaggaagaacaaataaaatggaaggaggaacattttaaacatctagaagacgtgcatgaaaaacttatagatcagtttaaggcaagtaagaaggagtgggagttggaaaaatctacattgcttgatgagatttcctcattgaagtctttgttatactatcatataataaaatgacatgatctgcaacaccagttacagatgtgcaaccaagcccttgctcatgaagaaagcctgagaaagcgtctggaagatgaagtctccaatttgaacaagaagtgttttcaattgatgaagcagttggagttgaaagatgctgttttgatcagttccaagaaatatatcaatgaagagcgagagaaagcagcatgtttgatgaggcaggttgagtcctatggatttgccaatgaactgctgcatttgccacacaacgaacttgataggcacaaggatttgcatatggaagatggtttcaaagaacaacttaaggaagtttatgatgctttagacagggcaaacattgaattggatgagagaatatgtgaaaaaagtgaaatggagtttgaattgagaatatggaagtcatttgttgaacgtttgaggaacggtcttgaagaaaatcttgtcatgtgcaaagaactggaaaattcactccttgcacaagtagattttactgaaagcctcaagcaagagaaagatagcttggtttttaagttagaagagaaagagaataaaataga

SEQ ID NO: 5348 - DNA, 747 bp, Glycine max
aatttccccaacagtttcgcctacaagcattgcaggcaatgacattctcttccattcacctgcacaaggaccatattaactcaaaggaatgccaattattacccatgttgtccatgatcatgtccaagtaacaatttctttcgaaggtgaatggagagaacaaacaaaacctgtgtttgctggaaacttccccacaggagatctccttgaggcaccgttcttgatccttcataatgacaagaatacacaaagcatttgagtttacaacttgcaacaacaattaactgaagtttaagaataaataatgaatgtaatgttattcaatcacaaaatcgttatttatacacagtccgtgcatcgacacaaaacgtacaattaattatgttaatacatattagttttatttcttaataaaacctaagtggatttcaccaaaacacattaattatataagtaatcatactttcattatatttgttattatacataaattatttttaaaaagtagcccgtgcatgcacggggtaaacatactagtttataccaagtttgtgtacttttataagtcatatcaaagctatctacggtgagtatgaactgaaattgaaattcaaatagaatctaaagcttacctgagtgattcttgcttgcatctgagactggttctgagataacctctggtgctgcgagggctgagattcaccccagacaccaccttggttccaccagtcacagtgtactgaagtt

SEQ ID NO: 5349 - DNA, 717 bp, Glycine max
tggaggtagaacttaaaaatgctctacttgaattagcatttattcaaacatggatacaatcagtctatttttcatccaaaaacagttttcttatttgagtctctattaatcttgtcacattaccaaactgtttacagcaagtatactattatctgttcctcaaaagtgctactctaactttcttcctgatatttttgcttataatacagccgccacccttctgtcaaatgggctcagacgtctgatgtactctacttaacagttgagctgcctgatgctcaggatgttaagctcaaactggagccagaaggaaaattttacttctctgcaactgctggtgcagagaagattccttatgaagttgacattgatctgtttgacaagattgatgtaaatgtaagagcagtgacctgatggtttgttaatcatatctttttcatctatcttgtaattagtgtggtactatgtcttctcagaatagcaaagccagtgttggttcaagacacatctgctacttggtgaaaaaggctgagaacaagtggtgggacagattgttgaagcagggagggaaatctccagtctttctgaaagttgattgggataaatgggttgatgaagatgaggagcaagataataaacgttagtgattttctaaatttctgttaactttaggtttcattttccattgttttgtctcatttccatattcccttttca

SEQ ID NO: 5350 - DNA, 698 bp, Glycine max
aagcacatgcttcttctaaccttgccaccacttccggtggggctccaacctgcaaaggaacgtgtgaaaactaaaaaccatgtatcaccaaaaaaaaaacatgatataataatttccatgaagcaaataactgtctatatcacttttgctttaaagggtgggttcttttatttgacttctttgccatatcaacatagtgttattagtagaaagaaacaaggaaaaaaaaaaaaaaaaacaagtccacagtttcacagtacacatgccacacaactcagatccgaacttgccaaagaaagctagtgtgcagaaactaattaatataattatgcatcgatcgttttcaaccactgagtcaaaatttgtctacctcttttacacatagagggggtgttggggatgtgcatatacacatcacacaagagcagttaaagttaagctttttctttttcttttctaaccttctgacaattgacgtaagctgccaagagacggtgatagtgaggatgagccatgatcttggccttgacagcagaagaggaagaggaggaggagcttccattgttgttgttgttgcggtgatggtggtcactctccatgaaatagtaccctaacccagtgttagtgctggttttgttgttatcatcatcagtgttgttgttgttgtggagcatgatagaaggagttccagaactgtt

SEQ ID NO: 5351 - DNA, 717 bp, Glycine max
aacagtactggaactccttctatcatgctccacaataatcacaacaacaacaaaactgatgatgatgataacaacaacaacactgggttagggtactatttcatggagagtgaccaccacaaccatcaccacggcaacaacaacaacaatggaagctcctcctcctcctcctcatctgctgtcaaggccaagatcatggctcatcctcactatcaccgtctcttggcagcttacgtcaattgtcagaaggttagaaaagcaaaagaagaaaaagcttaattttaactcctcttgtgtgatgtgtatatgcacacccccaacaccccgtctttgtgtaaaaaaaggtagacaggtttttactcagtggttgaaaacgatcgatgcttaattaattagtttctgcacactccctttctttggcaagttcggatctgagttgtatggcatgtgtactgtggacttgttttttgtttctttctactaaaatataatcactatgttgataagttatatatgttccatagtaagaaagagagttttggcaaagaagtcaaaaaccctttaaagcagaagtgataaagacagttatttgcttcatggtaatattaattatatcatgtgtttttttggtgatacatggttttcagttttcacacgttcctttgcaggttggggccccgcctgaagtggtggcaaggttagaagaagcatgtgctt

SEQ ID NO: 5352 - DNA, 739 bp, Glycine max
tttcccagaaaaaaaaatggttacgatttagaactaatgatgtagcacaaataattgttcaaatcattatgcttccagcaacaaaaacttagatgcaacaatggagatgcccatggcgaatcaaaatgcactggaaaatagattggcacgatcataaaagatcttctacacttctaatgcctatttaggtgtgcttgataaagatgaattagggggcagggatagttttaagaaatgaaaaatgttaacttgttactatatgtaacaaaagtagaaacatcatcatttcattacaccaaatgttttcatctctattttaagatgacaatgaagtgaacatataataaaagagctcaatttcgatacacttggtataaaagtttttatattgacaactggttagaaatctccctagatatgactaaaataatttttacaaaagtcaacaatttttaattatgtgacaatttatgattggataacagtgtaaaaagaacatttgtattgtttgtgtatttcctattaaattcataaaataacatttctttcatgcttatttttatgtttttcttggaaatacttttcacctatccaaccatgcacatttttaactaaaacaaaaaatagaagcaataacatacttgaattgattgattccatcagcaagagccgaaccaaaaaggaccataatcttgtctgagatgccaaaggcaatatttttccttgacactacagcaat

SEQ ID NO: 5353 - DNA, 774 bp, Glycine max
cgcgccagtccagctgcatgctcagtcaggtatgggctttgcagtccccctggtttctacaaatttgaagctgtttctatattttatatgatgttaccttaaatcatttgcttctttttggaaagatctgttctttgcttcatcaaaggtacaaggactttgcaccaagcctggttcaagggcttctcaaagtcttctctcctggaaaacctggtgatgaatcagatacagacagaaatttgaaggcaatgaagaagcgcagctctctaaagcttatattggaacttttttttgttggagttattgaagatggtgggatttttatcaatatcataaaagatcttagcagtggggaacagctaaaagatcgggatgctgcacaaacaagtttgacccttctttcgagttttgctcgccaagggagaatttttctaggactttctgttagtgggccggaaattcatgaggaggtatttcttttgttaatcttcattagaatattctcatgttttgtattattaatttttgtccatttttcctttttagctttccattgactttcataacctatagtcatttttcatcatgacggcaagtttaacttcatcttttgtttgtatttatatatcattatttgtatcgaggtttgttctctgttgccggctgtgttttatatgttcctgtactgacattctgatacagttttttaaaggccttaacatcacagcagatcagaagaaagttttccggaaagcatgctattccttttatgat

SEQ ID NO: 5354 - DNA, 771 bp, Glycine max
cttcatgaccgtttacatgatgcagagacacaactttctcaattgaagtctcggaaacgtgatgaattaaaggtattattttttaaaaaagtttgaatttctacattttgacaataaaaggcattcagttatgccaatgttaagtgctgtgcgagtatatgtttttatgcttacaatgattattcttacatttttttacgagcctgtgtcttgaaggaaataccacttctatttttactcagacttggcatatatgcatgtgtgctaaggttttcaaaatccaaagtatctctatactcaattctgtggggatcgtggcttttacactagtacttcagtatgaaatttactacttctgtccttgctttatctgactactacacttcttgctatctttccccctgctatcattcttcacttaaactctgatatgggtgaatgtaatattcatgcattgtttttgccaattcctgaaagatagttttcagctctttgttctacctagtttttcagctgataggctgctcctctgttaggaaggagtttgatcctacccatctccattcttctaattaaagattaggtctgtcctaccttcaaggccaaagttcttttgtgtgcaggggcaccttagtggtataagccattcccaggcttccagataactatccagcttgctccatcctctctatctttctcctccttcctctctttctaaacttcaagaccacactttgctattctctctcctggcctctctattttttgcct

SEQ ID NO: 5355 - DNA, 752 bp, Glycine max
acattcaataactttagcaatgtctgatctgatgacttgaaaacatgaaacacagtggcatatatatttcttctagctgcctcacagttccatagcagatcgcagaagtagaagatgcacacttgagagaagtggaaattgggttggtaaagaggaggggtaaggaaataaggcatagtttcattgttttctttactttaacagctggctatttatcaaaaaccttgcttcttgatgaaggcatagaacaaagaaattttactaaatgcattcccattcattgccataaatctagtgaaccactgctgaaaatcttccatacactgtcttgcaaaggggtaacaactaggccactcagggaacaatgaaaccaaaggaccttcacaacaatatgctgttctgtgataaaaaatggtctctaagattttctacaatgccaagactaaagaggtgcaaacagtttatatttgtcttctatacacctccacctgtcttctattcagaatttacaattttgtagctttgcagaagaggaaaattctcatttctctgtagttggtggtctatacatttccatctattttcttcgtagaatttacagttatatagctttgcaaaagaggaatgttctcagtaattgacgattcctggctaccaacattttcctcctcctcctcctcttccttctgttcagttgctttgccccacatcacagtataaaacccaattgatattattgtggctccaattat

SEQ ID NO: 5356 - DNA, 707 bp, Glycine max
agtggctagtgcccactcctagtacaaaacacgagacatgaacactctaaaatggatcgataatcgaaattaagatcaaaatcactcaagagatcctcatttcatccatttttttccttcataaatcatattagcaagtgaagtgtcacaaacagagagtcaaatatgaccttgaacgtggtggagaagagctccggacgcggcggagaagagctctggtcgcggtggttggttgaagaagacgcagtgatgattccaccgaagggtgttttcctcgattcgcagtgttagggttacagaaaggtttgttttggggcttggtttttatgggcctaggttcttagaagcccaaaatgaaaaaaaaaatgaaacttgacccaaatcaaaatatgatgaacacataaacaaaagtaataaatgaaaataattataaagtgtgactgtgatgtgagtgtggtgcagagggaaaaaggggaaaaacagatttggagggaaaagaagagaagaggagatgccggtggcgaggcgagagacgtgcgatggaagagtgattgctcatgtagacatggattgcttctatgttcaaggtaacataacccttccattctgctttaatttgagaagtgaatttagtgatatattatacgatgttgtttgtgtttgtgtagtggaacagagaaagcaacctaatttaagaggcttgccct

SEQ ID NO: 5357 - DNA, 790 bp, Glycine max
gagcaaaatttgcattatagctttttatgtattttaattaagagtagttgtgttctcctttcattgtttctgcatgaatgtacctagtacttttgttagttacgttaagattactgattggttgtaaaatggatggttttcaggtttcaggtttcaggtttcggatgtaatttttcccgttttagatctgattttcagaaactaatagttataacttctatgatgtaaatgtgattctttccttttgaaccagtttcctaacacgcttggcgtctttcggagatgataacaaattcttaaaaaaatgcctatcagatttctatgattatgtggattaagatttctaaattttctccgattattatactatacatttcaaaacactattaaatacttttctacactacattcttataaaaaggacctggaggtaataagatttactaaaactgaaatttgcaagcttttattaatatgaaagattcaatatgaattatgcatcaatcaatcattagtacaattccaatttgtaatccaataaacattactatccccttctaaagtacttttcccaatttctggacacgtgtaacaatttgatcaccctgactaacttagtttgcaagtctgtcataactattcttcaagagtcctataatacaattgaatccattcctttaattactagaatataacattaatatataacttcacataaatagagctgcatatagaagttcattccaagtatcaggtactcctggtaggcaccaatgactgcaggcataca

SEQ ID NO: 5358 - DNA, 684 bp, Glycine max
atataaatatgaatatagccctttaatgttttttttaaatggtttttttaaggggaaaaaagaagaagtttgtgtgaaataaatagaagagagaaaaatattttttccaagaaaacataattcataaactgctcaaaattagtaaaaattggtaattaatgatcttttaacctatgcaacttttcacaggatagaaaaatccaaaaataaaaggttttgtaatagtttttttttaataaactttcattatttttctaagaaaagtcgaaataaaggaatatttacactacaaagacaatgccaacgggataccaagtcaattaacttatccagtttaatctaaaaaattatccaatataacaaaagtgcccccatcaagctttgctgtaatcacatatactttcaatttagcatgttaattagaatttgaatttagaagtttttactttttttccctctattttttacttgttgatcttagtaaacattttaggattttatctttaacttttcattttttccttttattttcatttttttatcaaaatcgaagggcttttaccttactttgacacagacaaaaaaaaaaaaaaaaacagcccctagctgattatgggcgccaagccacgagtctgctaacatgaaaaacagattttttttctcactcgagattaagagttgaga

SEQ ID NO: 5359 - DNA, 823 bp, Glycine max
gtctcacataggaatacttttaatatgtctgagactgagatttccttgttaaatgcatatgtttccttgcctaagtaatttaagtcgaatgacttctttctccatcagctgattttctggtctctacattttggtgagcaaagcaagaattctgattgtgtccttcacttgcaggtcttgagaaaaaatttgctcaaatatgttgatgttaaggagtttgctcctgaagctaagtttcatggtccttgtcattccttcatcttatccaatgtcatatgcaggtaaaaaaaatatactttttgattatcaattagttttaggagttaataagtttttgttattggggaagacacaatttcttgctcgagtttgactatccctcatgtgcctacaaccccatgttattaattgtttaccaaactattgaatttcgtttaataaaaccattgactattccttataatttcttatcgtttttttatgggtcgatgtggtttgtgtaaatttcttgcttaagaagggttactgctaacataattcatttaaaattagaaaatgccaaggtctttttagcgttgtcatttctcccaacactatgcaattgcttgttgccctgtagggttggggtttatctatctattatttcttaggcaaatgtttgaatttgcaagcttgtgcactaatcctgatttatacggatgaatttcccattgtctttatatgttggatccaacaatgttaatcatggtctaaaaaaaaagtgcattaagattcctgtattcacatcaatattaatttttctttttcgggtacagctattgta

SEQ ID NO: 5360 - DNA, 663 bp, Glycine max
atgggttcaaggttaaaaatggccattttggtgatgaacattaaccaagaaaacagcataaatacaaaagttgaaactcctacaaagtaggcattctgtgttccttgttcatgactgttttggtcggttatgctaattctgcggccttggacatatacacgttcatcagcttccggagctaaactgtttccaattggataattgtgctgagaaatttccctcaacaaccttgaaagcagcaaattcacataaaaaacattgaatgttttttatttagcaagcaagaaaattaatagtaaaaaactcagtacttttttgttgagtaaaaaagtcacaaaatttgagtcacaaatcaatctttatcaattgcgattcattcctcttaaatgaataccatatttattcatttattttgttattatcctttattgctgttcctcttacctttatccgtgactgcccccattgacagaagggacaacaccaatggagagaaaaaccaaaaaggtcttatattataaaaccaaaacattcaaagaaacaccttaggaatcatcaaaaaccataagtgggaaaagggaaatggaggaaaaaaataatgctaagctttttggaaatactttattttaaagagggtgagatagccacaagagattcaatcaa

SEQ ID NO: 5361 - DNA, 795 bp, Glycine max
aaaaggcacaaagtttggttctggttggtactgcacacaataatctaatttgatctaaagatatatataatgtggggtttgttgggtatgggttggatccactacatatcttgcttttggttgattgaatctcttgtggctatctcaccctctttaaaataaagtatttccaaaaagcttagcattatttttttcctccatttcccttttcccacttatggtttttgatgattcctaaggtgtttctttgaatgttttggttttataatataagacctttttggtttttctctccattggtgttgtcccttctgtcaatgggggcagtcacggataaaggtaagaggaacagcaataaaggataataacaaaataaatgaataaatatggtaatcatttaagagtaatgaatcgcaattgataaagattgatttgtgactcaaattttgtgacttttttactcaacaaaaaagtactgaattttttactattaattttcttgcttgctaaataaaaaacattcaatgttttttatgtgaatttgctgctttcaaggttgttgagggaaatttctcagcacaattatccaattggaaacagtttagctccggaagctgatgaacgtgtatatgtccaaggccgcagaattagcataaccgaccaaaacagtcatgaacaaggaacacagaatgcctactttgtaggagtttcaacttttgtatttatgctgttttcttggttaatgttcatcaccaaaatggccatttttaaccttgaacccatgcctgcaggcaa

SEQ ID NO: 5362 - DNA, 685 bp, Glycine max
accctgcaatccttatccaactgttcaaaattttttaagctgtatttctatttattattaaatataaattattttacatggacaggatccaaatcagacaactttcttgagattacacaacctctcattttcttattttctatgcttagaattttctcaccggcaattttctcactcggtgccttgggctattagacagtaattatttgtgattgtgggtgattttaaaagtagttgaaggttaaattaggaataataaatgtgtacacgaaattaaatgggataattgtctttattaatagttataaataataatcagtatccatagtaactaattgttgcaattaaaaatgtagcatctcaaaccggaactgatggaagccttgtatctgaagagggttccacacacaaagcatcagacccttttgatattggaggtggacacgtggaccccaacaaagcaatggatccaggactcatatatgatatcaccactgaggattatgtccaattcctatgttccatggatcacagtagtgcatccattagcaaagtgactaagaccaccacaagttgtaagaaaggaaatcaccaagcactgaacctcaaccttccttccatatcagtgccaaacctgaagagggctgcaacagtaatgagaacagtgacaaacgtgggaaatatt

SEQ ID NO: 5363 - DNA, 736 bp, Glycine max
aaaaggtaaaaaaattgataagaaagaaatcaatttaaatatcaagttcttacgggtattcgcgcgggaatctttacccggaagtaataatctgtcccagtcgcacgcgtcacttctttattggtgcgatcctttccctctcgcgccctcaaaaaatctacactccattactgcaacagttccaactttgatcaatggcttctcaaaaccctaatcagagaaattctctgtatccacaagtaatcgattctaaccccgatgctccctcacctctccttatcaccaatcactcgtcctcttcgcaaccctgcctctacccttccgttgactacaacgacctcgtcgagaacctattctctgaggatgccaccgccgcctgttccccctctgcgccgccggaggccaccgaggaagtcctcttccggatccccggcgcgatcctcaacctcgtcgacaaggactacagcgtcgagctcgcatgcggcgacttctccgtgatccgtctccggcagggcgacaacgccgtcgccgtgtacgcgcgcgtcgccgacgagatccaatggccgctcgcgaaggacgccgccgccgtgaaactcgacgactcgcactacttcttctccttccgcgtccccaagggtttcgatcccgatgaagaagaggatgtgctcagctacggcttaacgatcgcgtcgaaggggcaggagagattagtgaaagatctggacgcggttttgga

SEQ ID NO: 5364 - DNA, 728 bp, Glycine max
tgattcttgcaactgggtttgtgcacatacttccagaggcatatgagagcctaacttcaccttgccttaaggaaaatccatggggaaagtttcccttcactggatttgttgccatgttgtcctccatagggaccttaatggtggactcatttgccacagggttttatcataggcaacattttaacccctctaagcaggttcctgctgatgatgaggaaatgggagatgaacattctggtcacatacatgttcatacacatgccacacatggtcatgctcatggatcagctgtgtcctctgagggttcaattacatctgatgtaataaggcagcgcatcatatcacaagtaagatcactcagtgcacgtttggattaaaatttacaaacttaaattcgaaagaactttattttgctaactgagtctgcaaaagtaactcttctgagttttaagacaaattgaagcaaattttgattaataatgggatccaactgaaagctaaaaaagttttttcggctttactttttaaatgtatgctcaaaatttcctaactaaaaatcaaacaagtccttagttattgatatgtacctttttttttatatactcctatatatgttggactagagtttttttgtgttggcaatattcagtttggtttattggtttgtgtgctaggtgttggagataggaatagtgatccattcagtgatcattggaatatcattgggt

SEQ ID NO: 5365 - DNA, 809 bp, Glycine max
ttatattccaatggctttagtagtgatttaaagggaaaaaatgtataaattaaaaatgattttaggaaactggtaacaacttgttcattaagctgatctttaagtcttgtagagttctaatgtcatatcaccttaaatcaagaaacaccattttttgtttgttgctttttgaagaacctgtcaatgccattggctcttgattatcaatacctttgctgactgttgtttgtctctgtaaatttgttgagttcctctggtagatgaaagaagctataagatattctactctacaatttagcatagttgagtcttccaggtctaatagatgaaagaagttatgaaatagaatttagaaacatcttttatttgatgtgtttgttaatatgaaattaagatgttttgtaattgatcagagttgagggcgagccctggcacaactttaaagttgtgccttggtgactggttggttatgggttcgaatatggaaacagcctctttgcatatgtaaaggtaaggttgtgtacaatgatcctcccctatactttcgcatagtgaggagccctctagcaatggggtacactagtgtttctttttttttttttttggtaattgatcagagttcaagctttatctttatttatcgattaggttgaatattagtttttctagatcttttggctcacctaacaaaccagaccgagctgcctctagcattgtcactcaatcctcattgtgccacctataaatcaaagactttcagaagagcatttatctatctactttgcgtcttacaatgggttttctcaacc

SEQ ID NO: 5366 - DNA, 727 bp, Glycine max
gatggaaagattaggtcaattggaggtcaaaaggtattgttacttgctgtaacatttggaattggaaatttggaatgtttttcagcttcaccattaaaaaattatttgctttgatcaaccagataccaatttattgttgaattaggatggttttttgtataagaacttgtagaagggattgagacagcttgtaaaaatagcttttgatgtgtctccttgctgttttcttcaataagctctctaggacaacttataaaatagtttaatcctattttctcttcgattatagaaactaatagataagtgctttaatgataggcacttaggctctctttggataaaccttcccgtgagtatttatagaagaagaaaagtaataaataagcaaaataaatcaaactcctttaattagttaaaatcaacttatgcatttatgtatttagaaaagtttgacaagaaagtttctataaaagttgaagtgcataaagttgattctaacttgtagaagtctaactcaatttacctacttattttcttttcctatgagtgcttatggagcttcttcaataagcacttaagttatttacccaaattaacctagtaccaatgtcttttcttcattttttgagattttaaattgaattctattgattcatttctaatgatacttcttttaacaaatgacttccttgaaccaggtgatatctgggaggcgccatgtgggaat

SEQ ID NO: 5367 - DNA, 759 bp, Glycine max
tccagagaagaaggtccctcgcactatcgagaacacgagggaactcgacgagaccgtttgcaagcccgatgacgaagaggttttgaacttttattattagggttttagtcttctgatttgtgctttgtgattgcaaaatttgtgattttgtgctactgatatagtattatttgtccttagttttcatttgataatattatattggattaggattattggtgctaaatgctaattccacttttttctgagaatcacggatggtatgatgctaattgattgcgccaatttaaattaaaacaggttttcttagtagtttagtatcggcaggagtggggattgtggggggaaaatagaggggaacaagaacagatttttaaactctggaattcggtcaattcgcaaatgggatggataacttgtttttctacgagggacttttctttacaattttgaatttgcatgcagtgttgctgtttttcaaatatttttttttaattacttgtattgactaatgaattatacttgtttgcagttatttgctggaaatgatgctgatgaatttggtccaattttgaatcagcaacaaactcccaagatattaatcaccacttgccgcttccattctactgtatgttccctatatgcaacttgtttttaatctctacctagtctgtctggcataagtacttttggaggaataactctttactccttaattgtataacttgtttccaacttttggctaaattatgacttgat

SEQ ID NO: 5368 - DNA, 693 bp, Glycine max
caatcgggactcataaaattcccattttgtccaggaaatgcaattcactctattgtcagcaccattccctatggatcctcaatcttttaacccttcagacatggttcttaaggagcattttgaaccgagggctatagctggaacttcactgggacattgccaatctttggaccagcaatcatctgatcgttatctcaatggttcaattttttcaatgaaggtatcaacttgtgtttttgtctgcacttgcatgtcttgtgagtttttttttttttttttctaactttccttggagcatgcagcttcatcttcctacatattttattggatatagcatgtctcctagattttgaatcctcatgcttctatagacttctgtgattctagtagttgatacttgcactaaacatctaacttaaatttgtcatagccatgcacgattatcattaggatcatattttaatttatccaagtataataacaaaagtttatgatggataaagtacaaatggttattagtctacaagtgactatgaaaaatatctaagccacagttttgtatgattagggggtcaaattgccgagtgttgaaccacacaagttaactcatggtgcttctctgatataatgaagagtatgaaaagtctaatgcatacacccttgttagtgttccagagctgactgcaggtcgac

SEQ ID NO: 5369 - DNA, 778 bp, Glycine max
tgctcgatatctagatcacaaaatgcagttaacatcaatattttccaatcaagccacctatttaatgataatgcagtaatttcttaccagcaacttctgtacatctggtgctaaggattcggcaaattctctcccaccaatatttccaacctacaagatagaaaacataatatggtggcagtgactcaaaggaaaagatttgttttccaaggaaagaaacagagtaccaagacttgtcaactttcaaaatttactaaatgcacacattagcatatacaaaaactgtagaaaatatattcaaagtgagaccctttaattcacaaacatgggaaccataatagcaaagaaaagaacataaagagtcatccaaattctaaagtggatattttatcaatatataaattatatatattcattgcaagtccatattaccaagtaaaagtttttcatggcacatgatcaacagaggatggtaaaatgtataaaagagaaagtcatccaaatggacaaaaattttcaagacttcttgttagtacattaagataccaaaagaaacaggggaatatacataattgttaaatgattaatatgaagagcaagtctaagaaaggatggcagtttaagttttttccattaccataccatagtcaatgctagacactggaaggtttcattacgaccaatgatatcattgcgcactgtatttatagccaacctgagaaagtcatgattttcattaagcaaacttgatgttacaatgtacccaacgtgcaggcat

SEQ ID NO: 5370 - DNA, 729 bp, Glycine max
agtggtacctcaaataccttttgtcttcgtttaatgaaagaagctaatatcattgtcaggatccgtcacatcctagttcctaagccatgcccaagttgcatctcatggttcattaattttaattaatggcttcaatagtgcacccatccttctaggaaaatgtgatttgcctttttagttttccagtttgagggaaaaaaacaaaaatacagataagatataatgttgtatcaatttacttcattttttatgttgaagaacaacaaaattttatatattataatgcgtggcctgtgtatacctgtgcaattactatccgatggctaatttaaacaggtaaatgacgtagcagtggaagtgctagaaggtgatcctagaaatgttctttgcgaggcagtggaaaagcaccaagcttcaatgttggttgtgggtagtcatggttatgggactttaaaaaggtacaagttcattaattttggtcctagtaattatttttatgttgctttgtaatgatataggtcatataagagtatgacaaattttttttatgaaatttgtgaacgggctaagatataattccatgaatatagtaaattgtgttctaacattctcaaaaaaaccaacatcatgcaaactaaatttgccaagaacatgagtaagatattagttatcacaccttaaatccatgggaattattggccgctcctttgttttattgtttgttttttt

SEQ ID NO: 5371 - DNA, 797 bp, Glycine max
aagcttacaaaattacggacccaacccaacctccggtactggtggtgagatataggttaagtcatgtgtggttcaataatgttcaatggacattatttaaaagtcgtataccttaaagttacttgagttgatacatgcttacggagtcatgctacacaaccagcattttttttaacccttcgtgtctgtatctgaatgcatgattgtgtataaagaaataaagaaatggatgcgttttgatgtaaattaaatctatctactgcgacctaaagatggtaaaacgtctagttgattaattgtcacacacactgccaatggctaaaaggttttgccccttcacccaactccaccccaccatctttgatcatccacgcgtttcgaagtgatcatgtttttttttttatccaaatgattatgtattcattttgttgaaattctcatttcatattatactactatagaacaacccacttaaacttaactgtgatatttgagtagagttctaggttctattggttatcgagaccaaaagttaacattttaaaaaaataaaattgaacaagacaggtaaatgattgactcaatgttttgttgataatgcatgttatcaatcttatcactactgatatatatatgacgcattgaggaagaatttgattgtgattaaattatctcttcgttttatgttagataatatcagttttttttcatatttataatagtttatccttttagaataatttatcttttagattgctgaataatacagattcctccgtacagttttatctccttta

SEQ ID NO: 5372 - DNA, 725 bp, Glycine max
agcaatgacagttgtttacgcacatctgctgtttgggtcatagtaaatctaacttttcctgcaagtcctggggtatttggtagggttgtaaaactgcgtaatgtaggcattgtttctcaaatcaagaagatggtcaacgatccttgcatggatgttaaggtcttttaatctacatttcatactgctcttgttctatactctctttggactcaaacacaagtaaagaatagctaatttacgctaattaagaatgttagttagcctcatttaattttcttaaatctcatttatataatgaacttcatttcctaaattatctttcaagctaattgatgggaagacttcaattctatgggaacttgtttcaaatgggaatactctccattttaaaggccatgtgattgatatcatgagaataaaaggagtcattgaaaataaaaattgaattacataaaaggcattttgtgaatgatttcattaaataggatggaatcaattaagatttgcttatattttggaccactataccttagttgagatttgcttatattttggaccaccatacctgagtttagatttgcttatatttgagtctgaaggaaatacttcttttggtcattttgcaaattttcttttgttgatgcagcttcgtgcaagacaagcacttgggcagattattacttttggtgataggtaattgtaatcagttactccattcaaagccc

SEQ ID NO: 5373 - DNA, 835 bp, Glycine max
gcctgcagagaaaaaactaagtccaattgaagagatgtcatctctggatttgaaaacgtacgtaaactatctattactatttaatttaagtaacttctcttatgttgtgttgtatttccatggaaattgatacatcaaactgtttggcaacattttgttctctgatgtgactttgctaatacgagtattctcctctgatgttaagtattttatacatttatctttaaattttaccatcaccgtccaaatcaatctaaaggtatgagaaaatatggcttttaaaacttgaaatgtgggcttaagttttccattcatcattgatgttagttatttgttctgtttggcgagaaaagttgcatatccaatcatgctagctagtgattgcatcctagagactgacactaacactcacagcactggcatgcaactttaatggagttttagccctgtatgctttgtttcttctattggcagtaattatccaaatcttatcacttaactggagaagagaacagatagatggacaaaaaggtaggggaagctttatcgatgaatataacttatataaggaataaaataaaagaggaggattttagatagaccgtcaatacagtcttcatcaaggttcttagtgggttatgatgtaagaatcatgaaagaactttgagtattttcaaggagccatcccggattagggctatgagaggattaatatttaatggcactatgtaaagttttttgggcatatttgacatgcagagacatgaatactaatttttatgctgactttatgactgaattgttgacagtggtattgagatcactgaagctctga

SEQ ID NO: 5374 - DNA, 821 bp, Glycine max
agactccttcacaatttccttgttttgttcaatttctccaagtattcctctctcctgcaaaagaagaacaagaaaaaggcatatcagcagcacttcagtggtgttaagtcattataggaagagtgcaaacacttttcattcccttgtaacattcaaaagtaactttttaacaaagtttttgccttagcacagtagggactgaaagaaatttgttaaatgcacaagtttgcacaaaaacaggtaatgatgtgtagggaagtaaataggtcatcatttgccagttaacatcaaaagaaatatttaatgatgcttactaaccaagatcagcatgtaatatctcccaaatgcagaataaaacactgtgcatgaattggtacattttcatgatcctttaaagtatcattaaatgatacaggctatattatgctctcttgatatgggagcaatgtgacctacccttaaaagataattatcaaaaagaactacataaccctttcatcctaatccattcaaaatttgttattaacgtatagcttgattttgtctaatcaaatgttagcattgccttgtcatgtcagtcttctatcaatctggaaaagttcaaccgtataaatgcagctacaaacataccattagccgggatttggaagcctttgaagggataggtttgtttaatccacgtgccgcagagaagcactgaggagagggaggattcgttctaatttgttgtaaggtcccctccctcttgtgctttagattctccaggtcaagagttattgacatgttgttgttctctgcctcatcaggtcttctgcaggcat

SEQ ID NO: 5375 - DNA, 707 bp, Glycine max
attcaattgcactctctgctaagtgagttagttagtaggttagttattgacagctattcacagatgccataactaactatctaagcctatgtataccaagttgtaacacaaagatcagtgaccaataatatttttcacttttcatttctaaagtttttctatctcaaaatatcttctactagattatattatgatatctagagctcagtaagatcatcaatggcggcacaaaacaacgcgtttctcacttcttctttccctaatttgattgcacataagcttgatgatttgacctttctgctatggcttcaacaagttaagccagttatcaaatctcatcgtcttcaacattttcatggttacctcaaggatattagatctcagagatggaaaatgtggtggatatccttaacttggtgcatttggtttcatagaaacaaaatagttttctcaaatgaaactttcaatggtcaaaagatgatggacgatgcaatctttttctattgggtttggctcaaaaatctggaaaaaggatttgatatttcttttcaatcctgggcaagcaagattaggattggattttgtaataggggggggggggggggggttctatttaggtcaattttgtggagggacatttggggtaaaaatcaacttcacaaagagctgtttcggagtatttggggtaatagatcaatggaagcaat

SEQ ID NO: 5376 - DNA, 788 bp, Glycine max
  misc_feature (773)..(773): n is a, c, g, or t
attgcaatcaatggctccccacattttccatctgcacgagtaggcacccaatacagagccaaataatctccaacatctttaagtaatggtttatatgttctgccataacaaggaaaataatcacaaaatcctcaactacaggtacagtttctcatagaaagcatgaacagtatatcagtacttacagctccgtcccacatattacaacatcagaagcattagatatatctagtagttcagatccttcaagtttatgctttgtctgataccaaatatactctccaaccccttcatgtccaccaaaatattttctcaatggtataagctctctgtcttcacaacagtcaggaattacaagttccattcccttaggatccgctgtgcaaaggggataataaagaaaaattacattataactatctcacaaaacataatagaatttaataaataaaaattatacctcaaacaaactgttgaaatacagagaaacgagaggcattatgagaaatcatataacaaagaagaaaacactatatttaattatttataggatgtgggctagaaagtaaagggctggggcacaaagacaattgttctaagtttgattttaaaaatggttttggccttatggaacagcataatagaaaggatgtagtacaagagaaaactcattctgttactcagaaactaaaggacaactttttgtcccatgttaaatactaccaaacaaaaaccaagaataccgacccacctcgtcactacatcaaaccccntctctgatcaaaact

SEQ ID NO: 5377 - DNA, 812 bp, Glycine max
agggtgaagaaaccaccaataccattgaaaaactttgctagcatcgagtctatgaaagaggaaatcaatgaagttgtcacatttttacaaaatccaagggcatttcaagaaatgggtgcacgggcacctcgggtatgatattgcatgaagatttttcaacttgagaaggcattgcttttattttttaaattctaatatattcttgcaaaattgtgatgcaattttccttatcaatttttaggttcctcctgttcccttgaaaattgatgcacaaagaattttttgttttaaatagaaaaaaccttgacattactcaaacatgcttaagttaaccctatttatttgtttcaattaagggtgagaaaatctatgagattttaagttaataattcttattaattttctttcacccaacaaggcaaatcccccctcccctcctctgattagaaaaatggacaaaaaattaagtcaccttcttccatcctttgccgtgtgcttcattcacacagagagtcagtttcttgtattttccaatggaaaagataactttcaaactatagagactaaaagagaaataaaatacaaactataaggactaaaaagatcacttttaaactataagaactaaaagagaattaaaatgtaaattatagggactaaaaaaaccattttcaaattatagggattaaaaaggaggaggaggaggctgctcacttattcttcaattgcagcaacatcctccctctatgatgggagtcattgtcctgggttaacctagctacagcactacctcaaaaccctagggatcacta

SEQ ID NO: 5378 - DNA, 791 bp, Glycine max
  misc_feature (770)..(770): n is a, c, g, or t
catcatataaaaaattccatagaaaataatcatgcaatacaattatgcaaactgtcatttcctgttcccataccctgtttatagatactatgttgttagtcataccaattgagtgcaacagcaagtccatatttacatatcacttttggaagacgtgtaaatactaactaggtagttaaatttaagtactgaatatatcttgatccccgtttttttttattcatacaaatttagcatgttacgaggaagacaaactctaatcaaatgaatgatttaacatccaagttgaagccagtaatcacccttttatcttatatatctgaagtcattggccagtttgtataactctgactacatgagtccttcggattgaggtacaaagatgtacatcttaaattaacgaattcattatattttcagcggcacatcaatttaatccatctaacaagcaaatattagcaactgaaagggaaagagagaagaaaacacagttgttttggtattgttgtaccacggataaaaggcaaccagagagacagtgcgaattatacaaacagaaaataaactgaaactgaaaatcaaatactaacccaaggaaggatctacagattctattaattagtagcagcataacagtatcgataattcttaggactgtgctgcttatcaacatgaagattgaaaatcataacaataaaagagcaactttaggagcaagatgtttaagggaagaagaaaataaaaataaatggaagttaccgaagaatganccaaggtgttcattacatttt

SEQ ID NO: 5379 - DNA, 705 bp, Glycine max
atcacaaaaaccctaattggaggagctctctattctacggcagctgaatgacgaaggatttatttatatgtgccacgacggtattactttgggcctttttgttttactttaggtttttcttcgttttgggccgcaggcccaataatataacacgaaaaaaaaagaaaaaataagagcggtgaagttattttcccgccattaagtggaaataaaaaagagtaatcgcaatcgaattgtactcgtaaggcataagcatcgaaaatggaagcgaaggaaggaacaccaaaattcccagggtttcctttcgaaccctattcgattcagattgatttcatgaacaggcttgtatgaatctctcaatcaagctggcgtgtctatgttggaaagcccaactggtgagaggtataattaactactgattcttctattttcgcggtgacatagaaatcaaggtttgtttattcgattcagttagatgagtgtgtgattggttattatatatatggaacttcacatcatactttaactcaaaatcttaatgtttagatttatgcgtctcttacttatataatgtttaattttttcaattttattttattcgatgatgtaaaactttaactcatacttatactccaataacatgaggtacataggttgttgcatcagtttttcaaactcaaaaaaacaagctgtcattagtccctt

SEQ ID NO: 5380 - DNA, 830 bp, Glycine max
caaatccgctcaaggtctttggctgccaatagtgtgcttaagctgttaagtttgatttatatgcaacatccttaatcctttgttacaccataattgggccatggtaccttttccaactttgaattaattcttttggcctcattgttgtcagtgtgatcataatgttaggaaaacccattctcccacttcttaggctccctccctcctaacttgtctcccttttcatcctttgttgaggagatagtttgttgcatttgtggtatgggaagtggacaaacaaacataatcgaaggcatgcatgtcaagatatttgtgatgctggtataaaagatgataatatcaataggacagcatcatgcctgatcataatgatagagggaggcagtaagggtatctggaaattagttatgactagtgggagagactaggcactctcaaattgtatagagcttatctttccttctgcaatttattgctgtaatttggattccatgatctgttatcctactgattcaggcctgtaccttccaatattaatatgggattctggtgagatgttaggataattggatccatttgcaaggtatgggacttgagtcccacatgaaatatgggattctggtgtggggtttataaggctttgggctctcccaaggttcttatcaaaaacctcacattagtgaatcctagtatatttcctatgatcatcaatggatgtatctaacaaagtattaaatgagcatataatgatatatagcaatgattaattttcctgtcagcttttttaattttaagctgttcttgtaatgatatttcaggtacaaaaatga

SEQ ID NO: 5381 - DNA, 782 bp, Glycine max
gatggagaatgatgtggttgctgttgttggtccactgtcatctggaatagctcatgtcatatctcatgttgttaatgaactccatgttcctcttttatcatttggggcaactgaccccactctatcttctctacaatacccatattttgtccgcactactcagaacgactattttcagatgtatgcaattgcagactttgttgattactacagatggaagaaggtgattgccatctatgtagatgatgacaatgggaggaatggagtttctgtattgggcgatgcaatgtcaaagaaacgtgccaagatctcttacaaggctgctttccctcctgaagccaaagaaagtgacatcagtgacttgttaaatgaagtgaacttaatggaatcgcgggtctatgttctacacgtgaatcctgatcatggtttagcaattttctccattgccaagaggctaagaatgatggacagtggctatgtttggattgcaacagattggcttccttcagtgctggattccttagattcacctgatactgacacaatggatctcttgcaaggtgttgtggcgtttcatcatcacattcctgatactgatctcaagaagagttttctctccaggttgaaaagccaaagagacaatgagactgtgagcttcaattcttatgcactttatgcatatgattctgtttggttagcagctcgcgccctcgatgcttatctcaatgaaggtggaaatgtatctttctccagtgaccctaagttgcgtgacacaaatggaa

SEQ ID NO: 5382 - DNA, 724 bp, Glycine max
aatacattctcctggtctcctttgctaatgtggacaacatccagagcttcctggaaattaaaaatagcatgaaaaaactcatgtatgtcaagctattatttcagactcaaaccacaagtcaaaatggaaattgtaagaaatcatatataaacttatgtgaatgcagatcattcataagaaaaaagtgatgaaaaataatgtataccttgactatgcgaaattcttctgcgtcatcaactcccgtaattgaataacaattgctctgcctcagatatttatagtcctcagcacttgttagatttagcttttctgcaatacaaagtcaaacatcaaacaacaatgaaaaggcaaacactaataaactagaatatacaacttaatgagttaatgtcatgtagaggagtattctagaataaaaagcttatatcattagggaaatcaaatcccatacatgtgcgattaggttctaattagtatcctcattagtttgttccaatcctgacccaactaaggagagatcaaagtcgaatgtctaattgagaaaaaggggagataaatgcccatttgactcagattgtaaaggaatgaatagtaatatgaaaagaagtaatgctaaaagagtttttttgagtattacaaagtgtgatagcattttttcaagttacaaggtttctccacattctattcagtgtgagcctaatcctcactcaaaatattgagcttt

SEQ ID NO: 5383 - DNA, 800 bp, Glycine max
aattagattcttcaatatcaacagaatgtaaaatgaataggtggtagaatatctaatctgtgcatactttttttaaattaatgaatagtgcatttttttctttaaaagcaagtacgttgaaattgcaattggggttttctaatgtgtgaccaagggtgcatgacaagaagacaaaaatagaaagttttttcttgaaaaagaaaaatatttactatattaaaaatacaaaaatcatctaatgtttgcttcttttagtaatttaaaacctttagcatatatttaattctttcacattatgtgcccataggcacacattagaaaaacttattataatttaaaagataaaatttcaccatcaaacacatcaagatactcaacaaacccaacaagagggcccttaaagctgtgtgccaacatcatgcatattcaagcaacattttcttaagttaaacagataaatgtaattccccaaaatccaattaccacccttgcaaaaaataaaaataaaaaaacatcacacaactgcccagagcctcagatacaaatcagccaatagagcctaatggaagattaaacaacatgaaatcaaaatctaaaggccaaattgcatggcatcttcccaacacaaggtatctaggctagttgtacctcatcatttaaagcagcaaatactgcactcaggttgtctgcctgggccaaatactcatcaaaacctctatctccatggagagaagtaaagatagaatgccgaacagtaacatcagcatctgcaacagcagaaatgagaagcttctcaacaa

SEQ ID NO: 5384 - DNA, 739 bp, Glycine max
aagttaggatagtaatatccacaatactatcttgataaattgcattgaacacacatgcatgcacaaggtgtgtatatagtgaggaagaatcctgatactatattgtaaaaaaattcagtttattgtaaataaccatcagcattaatttttatattgaacatgcattttcctaaagtgcatgtaagacgctatacaacttcactgtgtatctccccacacaacttacactactaaaaataaaacaatgtatgccccccccttttttttttaggggaggggagtgcctaaactctcagcagtgaacttttttattcttattgtagcagcattcatccttcactgaagtaacagaggaacaaaaactgtataaaatatgcaagcttcaactctaagacaaattgaaggtgttagaaatgggggtctaccgttggccttgaaggatagtgaaaagatacatttagaaactcaatacgccctgttaacctctgcaatgttacccctgcaacaaagttacactcaaacttcaatatagtaaaattaaaacaaaagcaaaaagttatgcaggaattcatcatgtttcccatgagtttctgttttctcttatttatttattgttacaatactgtaggtagaggaatgagaatagatacagatactggatacctagcactagctaataagtattactattatcacaaaaataataaattgagagctgcacatgacatgactgcaggca

SEQ ID NO: 5385 - DNA, 855 bp, Glycine max
gttgcctgcagaaaaagcatcaattgaatatcattgacattctttcttccctcaactcacgaactcagtaattcagttgtaagcgtaacttcattttgaataggaaataaaagaagcagcatcatgttattgctaccttagaagcttttggtttcaaaaaactttttttgtttccatttgttgcttttattgttaattaaaaaaatatggccttataatatttgtaactaaaataagaatttaattagaatggcatccaatcacaaattgtcatttatggtaaatttattggtttttataataattactttaaaagttttgagatcttttctgattgtcttacaatataaaaatctctgcactgccagtgtatgattaaactcttaaaaaaaacaaaaataagtagagtttaatagacatgttttgtcaatataaaagtttttgcactatcaaacaatcagaaatcatctttagtaaattggtacaacgtttatagtaattgttataaaagtaaacaaatttaccattcatagcaatttgtgcttagatcacattataaaaaaaaaaaaaacagaaaatgtttcctcaaaccatacaaattccaatttcatttcatacaaacaggtcgatttcaattcctgagcttcaaaaaatgcattgtcacgtcaaagacttgaattaaagtgtttgcaaagattgcgagaacacgagacctgtccatcggataggaacccagcaacatcaatgacagtactaaactccttggggagcaactctggcttgttcacaccaacttttgcagcctcagccacgccaattcctacaaagtttgagactttgagtttcaattctacg

SEQ ID NO: 5386 - DNA, 854 bp, Glycine max
tgcatgcctgcagctccaaatattacaagcaagagatcgtaaatgcaaaatcagaaggaaatttcatttgcatatatgaatttaggctgaaatgttaaagcagtcccaaattgatgctgtcttaactcacaattctaagcacacaccaaaacatgatgcataaaagagaaactcttgacctctcaaggaagggaaggcagggaaacaatttacaaataaatcactgttcagtttcccaatgcatgtgcagtatgcagttccacaaagcactgcataacacttactagcacaacaactgatgcagtaaaccaattaaaaactgcatatattcacctgattgctccagcagctgctttatgaaagtatgcatgtgaatgcaattggtcttgaaatttaagcatttcaacatatgtacgcaatgtcattttccttaagcagtatgaatgaaaatcaaattgatcttctgtaatatctgcataatgcttctccacagccagaaatttcttgagagccattccaagattaccttggcgaaaatagctttcagcaccggcaagctcataccttcaaaatataaatgttacaatgtgttacaaaatgaaaccataatattgtttgcaagtacatgatattacacatgattagatacaaaccacatgcactgcatatcatgcaggttgttgtgttgatcaccatcttttgtgaacaacacagcagttttttctgccaaagccacctggatatcaagggaacagaccaaaagaaaatcagaacaggcaaaagagaaaactacacatattacagcactcgagtgtgaatgaaattcaaatatatagatagaaaaaacctgatca

SEQ ID NO: 5387 - DNA, 673 bp, Glycine max
taatatattaatgcagtcataggttatagccttatataggccatctctgtaacattacccattcctgaatttgtataatgctttataggccactgatagtatgagttgaagttgtgagtgataaacaatccacagtaattcaaattatgtttctctacaattgattcaaattatgtttcctctatttctctgtttctgacatggctttcaggggattacaagcttaatacaagatgcaagtcaagattgggtcttcaaggtgatagataggaaaactcatacttttatgctgcaaagtgtgcctgatgctttgcctacccaaaactactgcatcagtgtacaaattacaaaatcattatgaatggtggtagcattggcaagcatgcagggatcacattgttgcaaccttgcaaaagtttctcatacatttccattcatgcggagcccccaaaaggttttggattcatgcttagcaacctccaaatgtggattattgttgagtgttgatcccacttcatatgatatgacaagttcatcatgaaatagatcatatgctacacatgtcagatccttgttgatagggaagtaactagcagctggcttcgagggccagtacctccaagaagaagaaggaaaagaaggcaagtatttatcattgatctgcaggcatgca

SEQ ID NO: 5388 - DNA, 772 bp, Glycine max
aaaaagaaaaagaaaaacaacaacaacatctatgcctatatatattttttgccacattttagtacccaaaatttgaaaccttttaacttgttttgtaaatgctgcaaaaagaagacagaagcagataataaaactcacattcaaaacgttaacattttaaaaccaagaaaaaaaaaagagggtttggagtcttaagagtaatatacatgtaaaacgttttctttttgtcaaaattttaaaggaacatagcaacataaaagagaatgtaagctttaagttagcaaatggttactgaaatgtgaaaacacaattaaaagcaaaataacatcatacatgatgcgtccaatcaaatggctgagatctccctacaaacacacgattcttgactgtcttaattagtatttgactagctcatctccaaaattattttcatgatatcaacctatgataagatattctttattagtcccaaatgaatgtggtaagaagttttacctcggcgataaattccatcaactagaacaaaataagtttagctgcatgtcacctaaaatgttcaagttatgctcatcaatattgaaagagaattagtgataattgtaactgtaaaaagattacgatttaggattatgaaaaagggggccaagattaacaattttctaacaaaaactaaagttcgccaaatttgtgaagataaaatctcatcaagttgttacatgatcaggagactcatcctataaattctttgctttcatttaaacaaaaaaaatgc

SEQ ID NO: 5389 - DNA, 749 bp, Glycine max
agaaagtttttttatttcacaatcactaatatagtaattttagataattaaaacttttcttcaatttactaaagttaaattttcgactttcctataagaaagttttttcgaaaaagtggactaaattgattctcggaaatcttgacaatcttttttttaataaatatataccaaatataaaaaacttagttttccaatttaagataggtgggaatgtagaaacttaccacacacccaaaggctattatattgcttctggcttctgcataagttttttccaatttcaactctcaccgcaaagagaagaagaacttgatcttgtaacaaaatgcttgatcacaaacataccaagatatctatattctcttttatcacattctcagccatattttatctcatgctctgtgattttcttatctaccacgattccctacaccctggaacactagtagaagtgctgcaacacagaaatggagaagggataaggtcaactttgactctctcacacacccctttacgttccatgcaagaagagaacgaaggagttggtgacagaaaccatggagtactagttgctccacttaatgccaatgaagaagagagaattgcatggtttagagggaagcttcgcgagttcaagattctcaattcagacaagttgagcaggcgattccatgctcgggttctgcgatttttcagccacgaatgcgagtctcgatttttcatgatttgggagtccccgcaggcaa

SEQ ID NO: 5390 - DNA, 782 bp, Glycine max; identical to SEQ ID NO: 3450

SEQ ID NO: 5391 - DNA, 789 bp, Glycine max
caaattgtcaaggcttaattagctgcaacaatttgaaaactaccaggataccattggatgagggagacaaaaattgaatttcagtaagaatatgagatcagaaagtataattatgcatagatgatggcggctacaagtgtcctactctactttaaacaaagattagagacctttggccaaataaaacccatgaccaagaataagagagagttttacttgggcaaaataagagttttaaaatgtaggctgaatgtattaatctggtcatcatataaagagatattatgatcttctgctatgtggtttcactgttttcactaaagtcctccaaagtaatgttatttctaaaaaattcttgtttataacgactaaaggggaaggatgtgatcggaattcagaaaaaacacataaaaacatatatatgccttgtctaattcttggatgtgaaaggacagcatatgtctctcacctgtacagtgcagataaaaaattgactgccattggtattagtacccgcatttgccatgctcaaaactccaggacccacatgcttcactgcaatgtttttttttttaataaatgccaactaaatatcagatatcctttattttaaaatccctatctgaagaagattaattaaacagtgttaaaatggaatactggcctaagaaattttttgaataccaattacaattaaaatatttaaactcaatatgactgatccagaagagatatacagttaaaattttcatcgtcaaagctatcaccatagatactgattccaccagt

SEQ ID NO: 5392 - DNA, 753 bp, Glycine max
ttgaatgttacaaatcaacatatcatggatctttcatcagattcagctgatactcacaatgagcaggtaatgtgaatgtgtttgtggatttccgaattttcttgttcagatagcataacagcataaaataaattgaatttgattgtgttgcactttttttttgttttaattctttgtgtggacttcagttagaagctcaattagagaggtcaactcaacagcttgatcaactaaaaaaggaggtttgtaatctctttagagctaacatgattcacatgaaagaatgatgaagtttttcaaatgatcaagtctactctagtatgcagctttatgatacattgacaaatgtttggttctgaacaattgcattttctggaggtgcatactaatgcatgcaaagacttcccagaattccaatatttactagttactacatgctgaattgggatatcattttaaaaacctttcaattctaactaacaagtcctgtagccctttatatgttatttttacctctgctatgtgttgatgatgctggaaagtggaatttcttgacttgtcaggtttctcagatggaagagggattggaagagaaaagactccatgttaaggaattacaaaagcaatctaaggtaccttctctcttattttccatgcatcacatttagaacttgtttactatactttattgcttgtccttactctgaagtctgaacaaaaaatatgtattatgttctgacctggaagatattt

SEQ ID NO: 5393 - DNA, 802 bp, Glycine max
ttggtgtccctgtgaaggccacaatcaaagaggtatttactaaatgttggcacatgtcaattccctcaactcagttattttaaatggttgatgaattttctttttctataaaagtgaatttgatatctcccacctacaaagaattatgtagaaaatttcaaatccaaatgtgatgaacaactttatgcaagaatccacatctatctgtgtttggtttggccgtgaggacccaaaaaccagcgtcctatcatgattttccaccacactagagagtagttggtttaagtctaccattattttttgaacacgatccactgtattttgaaacacactacatgttttccttcgagtgataacaaattactgttcatcagggttgcgaatttaggttgtcttcctttcaagtaaaatgcatttttttgcagctatattctttcttctttcccctgcttgtgttgaatctctttttctttttgttatggcatctgatccacaagcttaatttttaatttcttttgatgtaattttaggttcacatctgtgaatagatggaggtcagttgttcgctttacatttatataactgctgcacaactatggacaagtttttatctcagctgtgtttttgtttacactcgatagaagtaacaataactacaggaatatttgtgcacgtatattcatttttattttgaatatagattaaaatttttattttgaataggctcactgctcatatattcatgaatttagtatttttcctgtgtgatgggtaaaggtgatgaaacttgtatagcaacctt

SEQ ID NO: 5394 - DNA, 756 bp, Glycine max
agctgcaacaagcgagttggtttgacagggtttaattgtcgatgtggtgaccttttttgtgctgtacatcgctactcagacaagcataattgcccatttgattaccgcactgctgctcgggatgccatagctaaagcaaacccagttgtcaaggctgagaagcttgataagatctaagatttgaagtcaaagtttcatggcctgagatgaagttatgcataatttcatcatgaaatgatccgagtttccttcacattttatttggtgttcttattatattgttatatgtggtgggtgacttggagttattggacatctctgcaatttgaaggactctttcatgtgattggcgaaaatatatatgttggccacagtgtttaagtttttaagtgctggtttggtgaaagttggttggtgttgttagctttgtaatgcatctatcctgtatcagaatggtatgtgcaatttaaagatggtttcaagagcatccgtggacatgtggtagattgtaattattgtgggctatctatgaattattttcgatatgctagaattttcagaaattgcttagttgatcacttatttaatatagtaactaccaaaaaaataatggagttgggttaatatttgcgaatttggattggactgaattcgtactttaggaagaacaataataacgaggttaaacttttaagctaaactcgcgactctaattgttttgctgaacctgattcaatctcttagctgtctgcaggc

SEQ ID NO: 5395 - DNA, 934 bp, Glycine max
tgcctgcagctctaacagaatctgttagacgaaatccactaggagcttgggtggaatgattctgcatatgggcctgtggagtgcacctgcatcgcatggctggtggtgcggtgtctcattcctatcagagtctctatgagaatggttttgattggttcttgctaaggaatcaaaggggctaatctgcaaactttaaattgcagtgggagcttagattaccccagattgttgccttcatctttttatatactaatttctggtactaattatgtcagtttatactatgatgactggtggcatgcaagccatctaaaattctcaatccattaatagtttcccttatgatatatgcaatgttttgaattacgaaggattattttctgttttttttttttccattaagttagattatgtcattactttgcaactgaaaagtttcaaaatgtagtcgtagtttttttatatatatttgtttgctaagaccttttttttctccttttagttgattccggatgatatggagttccagtctggagacatgcccaattacactacatcagatggatcagtatgtatcatttataacttctaaaatggaaaagaaaatgccaaatggttttgggattaatcaatggacttttgcaggttaagatcaaaaagatagggagggagcctaagacattgggactcgagtggagctaccgaattgatgccctaatatttatcctttacctattttggggatgcggtaaataactccttccgtatgctaatctgcttaaaattaaatataatggaagcatgaatgctttgtcccgcggccatttagacccggaccgcccattcaaatgatagttccggaaagttccccaaaccacaacaccgaataggaaccgggcaaagaaacatatatgctcccttttcgaacctccct

SEQ ID NO: 5396 - DNA, 646 bp, Glycine max
aagatagacaatttggctgaaaaaaaagaacttgattcaacgttggtattgatgatcaccaaagcttggtcagcttccaaggagtcgaacatgatgaaagatgaggtaaattgatggtgacctcatcagtatcctttatgtatgccatttcttttttaatttcatgaacatggagggtaagaaattttgaatgattattgcaacttcagaatagcttctttaggctgcaatgcacatcagcacatgcacagttgggaagaaaaccaagtggataagtttggttgtttgttgtttttattttattttctaataaaaagataacaagatgttggtaacagtgtacccatctcattttactagcatgtgattacgacagaatgcaacataattaaattcctttccgtttttattttttgcaaagagagattggagagatggcatatttttggtgatataagaagctaatgagtcatgcttacatatttatgccatttttttttggagggggggaatggtacgaatctgctgttgacaaactacttttatgatgctttaaaataatttgacttgtgtgatattattacaatatatgagtatcttggtgattgaacataatcacagctccaatttagttttgtgaatatat

SEQ ID NO: 5397 - DNA, 770 bp, Glycine max
  misc_feature (655)..(655): n is a, c, g, or t
cttgtataaatgatagaggatatcttttacctgcaaataaatgtttcattttacaagctaaatataagacaataggaaaaagtaagtatattatacacagtgaaagaaaaattacgatatagttttctaggtattaggataccaatctgaaatgagtagatttgatatattcacaaaactaaattggagctgtgattatgttcaatcaacaagatactcatatattgtaataatatcacacaagtcaaattattttaaagcatcataaaagtagtttgtcaacagcagattcgtaccattccccccctctaaaaaaaaatggcataaatatgtaagcatgactcattagcttcttatatcaccaaaaatatgccatctctccaatctctctttgcaaaaaataaaaacggaaaggaatttaattatgttgcattctgtcgtaatcacatgctagtaaaatgagatgggtacactgttaccaacattttgttatctttttattagaaaataaaataaaaacaacaaacaaccaaacttatccacttgtttttcttcccaactgtgcatgtgctgatgtgcattgcagccctaaagaagctattctgagttgcaataatcattcaaaatttcttacccctcatgttcatgaaataanaaagaaatggatacataaagatactgatgagcaccatcaatttactcatttttctcatgttcgactctgaagctgaccaagcttgtgacatcaatacatgtggataagtcttttt

SEQ ID NO: 5398 - DNA, 693 bp, Glycine max
attggccgttacttctccatccaagtttcttccaagtatcaatttttttccagggaagcttgtgatgaggtatgagccacctaagacctcttgttgtctcagagtatttgataaattgattagttgaaaaccaacttgtgagggcaaagacttgtaggtgtccaatcattccctgtaaaatgtatcaaatgtttacaagataacccttaaatagagatattgtatagaagaactatcagatattgaaaactgttagtattctagttataataccatacattagtttctttacttacatgtagattaattgatggattggaagcaggactacttgcacctcccaaagcaagtatgcttaatgcttctaaatttgctgaggaaagtgaaaccatagcagctactagtgatgttgctattgttccggcactgataaatgagtctagtgcaatggatattgctggggtggagtctgaacataccatattagagtttgagtcaaacatagagaaaattcttaagtccatgcaggtatcattcatgttcacaatgctcagccaaaattgctgagattaacaaatagcatttaattttgaataagaaaaagagatattcatacaatgcttgatagcaagctggttagatgccaaattttcattccttggaagatcagtaaccttccctgcaggcagcagc

SEQ ID NO: 5399 - DNA, 710 bp, Glycine max
agacccggagcacccagttttagacctgcaccaccagggaggttcaatgatccatcagtacctcctccagtgggaccttccaatgccccaccggcagctggacctttccagcagtttccgccaccgcccttttccccaacaatgcagccacgtggtcctccgcagccaatgttaccgccatcaattcaatctccacctagtcaagcactgccttttcccacgtctcttccggctcaaccacagatgccttctgttccaatgggctctcccccgccgccgccacaaagtgctgctcctgcacatttaggttcaaattttcctcctccgccacctacaattcagccatcttttcctgggtacccgagtaagcatgccggtcctgaaatgcaagctccacctatgcactcctcgttccctgctaatcaaggaaattttgggcctgtcccgcctgcggcttcttctccttttttgtctcacccaggaggttatgttccatcacccccaatggctcccccactaggtatccagccaatgcagcagccaggatctgtgcccccaatgggtgccattcagggcttggcagaagacttcaacgcactcacattgcaaactcgtcctggaacaatggatccattatttgatgccaaggaacttccaaggccattggaaggtgatgttgaaccaaagaatttggttgacatgtatcccat

SEQ ID NO: 5400 - DNA, 767 bp, Glycine max
cagcatatgccaaaagcatatttggattacatttatgcacatgtcttgtatttttaatgacagtgagaagcattctagaatgacgaggactcaagggataatgtgccatggcttttcctaaaagtgtaagttcatccttgttatcaagtgcttcaagagctttcaagcaattctcagcctcaagcagagaagaatctttaagagaagtaggaaatgggaagtttgcaacctgaatgagaagcaataataatgagtatagaaatatctcaaactaaaaaaaaaaacagagaacagaaaaagaaaagaagatccagtttgatcaggaaggaattgaatgaatcacacagccagacatttgaaaagcttgataaattttacaatatagaaaaaaaattgacaatgcaggaacaaaattgagattataatgccttagaaccaaacaggaacaatctatgtgaatactatcttcttaatgatatatgttgtggaagaccttttgcctttggaataagaagcatcccattccctcattcagcccatgataaatagcaaagctatcagaaaggagaacttaataaactaccccctactctgtcatctaatgatagcacccaacataaacaagcaaatggaatgaaaactcaaaggatatggtaacacacttaacctacctttttaatatgcatggatttcaagagaaggacaacaccatgaacaggtactttctcaacttcggcaggagagtgctcaggaaattcattactaaa

SEQ ID NO: 5401 - DNA, 696 bp, Glycine max
tgcctgcagccagcacaataaaaaaatacagacatcattttggttttgaaatgggggcaaactctagaaataaaaaaatgttccatccgttgaagggtggacatttttatctgaacatgccttcttcagaaataggagatggtaggaaagcctctggaacaccgtcatcatcaataaaactatcatcatactcatcttcactgtaatcagatttctctgtttctgtatctgcaatgtcctccccaaatgactccctttccattgtagcaaaggaaatcaagaaaaaaaattgtaacaaaaaagatttcaaattacaattatatatttatttctctcttttgatagggcatggtatgtcactgtctaatcaaatcaaatataatacaaatggacatgaaaacactgaaaaatcaagtcagacaaataagatttcaatacaacaaagcaatattttttatgtccgtgctagaaaaacgggaaatgtggaaaaggaagaataaggatacgaatcatcaacgagattggagttgcgggcagtgacgagatagtaaccgcagagatgaatgctccgaggaccaattacagagaaaacaacagtttcatcaacttcctcgagctgtaaatttaactgcaacgactcggtttttccgggatagagagagcacaggtacacagggctcctgtttcccacattgc

SEQ ID NO: 5402 - DNA, 792 bp, Glycine max
agggctaaaattctagaagatgttttggttcaaatggtagttgaagactcagctgattgtgaggatggtggcaaaacagtagtgagagagatggttccatttgaagttgagtcaaccataatgatccgtattagaaaatggatagatgaatcactgcacaaaggaaaagagtgtttgcagagagcaaaagaatctgaagtaagttttagactctttcctacaaatataactgagggagatcacaatctattgtgcattaagaaaattaaataacatttttttaaggtaatttatgcattgttttctttttatctcaggcatggaatccaaaatctaaatcagagccatatgcaaaatcagctgtagagcttatgaatttggccaagaagattgtgcaagaattctttcaaattccaataccaataactgaagttttagttcaagaacttgctgatggattacagaaaatcttccgggagtacacaatgtttgttgctgcatgcggtatgtactctttaagctaacctcctttactctacaaaacttcatcaatttgttttttgtttctttttgatttgaaataaaagataagaaaagctcaagaaaggttagacttacagtacttgctagtcaagtcacaatgactaggaaacagcaaagattgtagcattctgatttattatattttgatctaaattttctcaggtttgaaagagaactacattccgtctcttcccccactgaccaggtgcaacaggaattcaaagttccacaagctgtggaagatagcta

SEQ ID NO: 5403 - DNA, 849 bp, Glycine max
tgcctgcagagggcaaaaattctagaagatgttttggttcaaatggtagttgaagactctgctgattgtgaggatggtggcaaaacagtagtgagagagatggttccttttgaagttgagtcaaccataatgatccgtattagaaaatggatagatgaatcactgcacaaaggaaaagagtgtttggagagagcaaaagaatctgaagtaagttttagcctctttcctacaaatataactggagggagaacacaatatttgtgtattaagaaaattatataatatatatatatatacacatatatacatatataaatatatctatatatatttaagatactttatgcattgttttcttctttaatttcaggcatggaatccaaagtctaaatcggagccgtatgcaaaatcggtggtagagctgatgaacttggccaagaagattgtgcaagaattctttcaaattccaatatcaataactgaagttttagttcaagaacttgctgatggattacaaaaaatcttccgggagtacacaatgtttattgctgcatgcggtaagtactcttaaagctaaatttgtttacttaaaaaagctccaaagactttttatttatttatttctgaattttgaaataagagctaaaaaaaagctcaagaattgttaagacttatagtactttctagtcaagtcataatgactaggaagcagcaaagattgtagcattctgatttattatgttttgatgtaaattctctcaggattgaaagagaactacattccctctcttcccccactgaccaggtgcaacagaaattcaaagttccacaagttgtggaagatagcta

SEQ ID NO: 5404 - DNA, 722 bp, Glycine max
acagctaaggagtgccaattgatctcaaaggaaagcatgcaggaacttcactctgtcatccaaagaaggaaaggtgatgaaactgttttcacaaaagtgggtggaaaatacttggcttccaggaacaagttgaagaagacaatgaaagccataaaaagtgagttttacactttgtccatgcttagtgttttaaccgaagcagaagaggtcacattgaggtcattagaatctttgttgttgtttatcggtgaccccaagggacaaccaaagcagagcagatggtcagcaatctcaaaactgatgcagcctaaaagagtggcttgtgactctcaagaatcacacacacaaatgaatttgacaaggtggatgaagttttgtactctttcctcagtcacaagccttcatctattgagtatcttctaagccgtattgaaaatttggagatgtgcattcaggatctagaaataggagttgagcacctcacaagaaaactaattaggaacagagtttcccttctcaacatattcaatcactaatcatagagcaactcacaagacataggagttgagcacctaacaagaaaactaattaggaacagagttttccttctcaacatcttcaatcactaatcatagagcatctctatgatttttgtgaactcaattttgacccatgagtattgtctcccaattgtacattaatgtaaattattttttgttctt

SEQ ID NO: 5405 - DNA, 700 bp, Glycine max
ctgtgaaacatatctaaccgtatagtgccattgaattgatttgaagagagaaggaggtaaccaagactttttcgatgaagaaatgactgtggaattggcccttgtaatttgttgttgctcaaatcaacagattgtaaattggagaatgacacatttgtgaattcatccaacacaccatcaaatccattatgagaaagaataagctcctgtagtgatggaagtgtgaagagggttgatggaacttttccactaaaggagttatcgcctaaattgatgctaatgaggtctaaaagcttctcccattgagtggatatgattggtcctgtgagagcattttggaaaagggatagatacttgagattattggacatagtgagagatggtagagggccagtgaagttattgaatgacaagtccaggtgaacaagatgggagagtctcgacaatgaaactgggagtgttccattaaattgacagctagataaatctactatagccaactgcttcaaattggaaatagtacctggtaactgtccagagaaatttgtattgctaagattcaaggtttgaagatatcctatttgtgtgaagtttggcaaggaaccatgaagatccagattatatgacacatcaaggatctttagcttttgcatttggaagataccctttggaaaaacatcagtcaatgcacaattgctaa

SEQ ID NO: 5406 - DNA, 815 bp, Glycine max
acccttcacactcataaccagcacatataaaacaatccttcaagtgatccaagccatgcaccctgagatgagtcacgcttgtattggttttcctcttcttctttaaaacctatacaacaaaataatacactttaagattagcaacaatctgaaaaccaaaatataggagaatttttaaaattgaaagcagaaaggctgagaggatatcatgcttactatgtccatatgttttatagcacacaatgaagataactgaatcagagaacttgtcctcaaaaagcagttcaccagacttgatactccataaccttagcttgcaatcctctccacctgagatgacaaagacaaattttttttacgaggggataaggatgaaatgaaattattttctaaagagagcaatgatctactaggtggatgcaagttggaacccgaattgcaatcatcatatctgaaccaattagacaagacattagcttctttcaacaaggatgaagaaacactataggctcagaacctaatcatcaaaaacttatctaagtcatcttatcgacattttacgtgttccataatccatatgaccaacattagactcaagaagccagcaatgcaactaagttcacacctcctaagtctcaaaccataattacattaaacatttcaagccacacgacataaaatcacacttaaacacaagatcagttagcacgaactgttgaacataaaagatccaatatccgaatcaacgaaactgtctcgtcaacaaatccgcgcaccagcaatggattccttcaaatctgcattcaacattgaat

SEQ ID NO: 5407 - DNA, 859 bp, Glycine max
ttcgaactaaaacagcaaaaacaaaaaaaaaaggttaaaacagaaaacatgtgctgttgagttgagagagagagagagagagagagagagagagagagagagaaagagatagtaccaatggcaagacatcggcggggttagagcggagtttatcgggaaggtcggagtcgaaggtgtcgagatctcccatatcgacgagaaggaacttagggttatggaggagactctccctgtaagggaagacattgttggtggtctcgaagtttcggatgaattccttgaatttctggatgagagagtggttcgaatcggtgccggcttcaccgcgggcaccggaaccgtcgtcgccggcgagcgcttggtcgctgtagtagacggctccttcgtcccagcctgacatcttctctcaatctcgttagggtttcagtttttttcgattgaagaaaggaaagaaagaaagagacaaagaagaacgactctccgaagaacgttaggatatgaatttgttcgattgaaagaaaggggctaagaagaagggtggttttggcgggaaagctatggcgggaaagtattggcggggtgtgagtgtgacactgatgttggcacggatgtatctatactttataaacttttttattctcaattttttaattttagcaaattttactctcaaattaatctgacccattttatgttttactttttaaagaaatttgaaaattttaatttttattatttgtttgttaattagtataaaagtgagacataaaatttataaaaaaaattgagcaacttcgtcaaaaataaataaaaaaaatagatgtaagattttttaaaataagctgcaggtcgactctaa

SEQ ID NO: 5408 - DNA, 805 bp, Glycine max
aagttatcatgcaaagtggcgtcgatatacaagtgatgctttggacttagccagcattattgtttaaataagaattaatcttccaaataacagcaatcgtatattctacagcgaaatacacgataaataagtttggaagtaaacgagctatgaacgaaacttaccaaacaaacattaacctctcaaaaacgatttacaaaaataaaaattagaaagtggttaatgaggaacaaagaccgtttcgcacatgatgctctgtatataagcgtgctatcttggcctctagggtgacaaatctgaacaatacacttgcttattcttttgtttatgcaaatcgcataatggaactgtatgttcacttcccaaacaccaaaaatagtaagaatgaagatgtaataacccaataaaaagaagaatgtgaagagaccatataaacggatattacaacttcagagcagctattgcttctgatttaaaatcaactcgcagacccaatacacgcctaacctctgctggagttaatctccaggtcataggtccagagttttcaccccagaaatctagaatctcagaaaccttttctaaatttagaattgttgccatttgagtaagacgtgcaaacttgtccctaacagttctctgtgtcatggcactgaaatggcttaccaaagctctagcatctcggtcaagctgaagaccacctagctgactaaatcttttctgcatcataatgacttctagccttttcacaatgaagtcaataatcaaatgaacaaacgtgtcataattgttagcagtcattagt

SEQ ID NO: 5409 - DNA, 788 bp, Glycine max
aatttttagtagcacttgttagttacctatattctctacagtttaatttagaactgcataaggtacagtttaattaaaaaaatatagttgcacacttcctaatttaatttggttaacaaaaaattctttttttttggtgaaattaacaaaaaattatcttataaaaattgaattgctgctacgaatgaattcagccgcaccaaataaaaacatataccattttttttatactgagcaatttctttttcttaaaacggtttggttaatatttaaagcgtgcttatttggatgttagagcattcaagcaagaatgatgcacgacacttttaactattttacttgtgcataactagaacaaaattgttcttttccttgctgcaaaaaccacccagctgaactagcttgggtttcttattgtaaacattaatttttttaaaaaaattccactagcatgatcattatgtgaaataatataaaagaaaaactccacttatttattttaccaaaaggactgaaaaatggatagaataaaaccattcttctaacttatttaggatagtgatgagcaccgttatgtacttcccattttccatttcaagtatctttctacaatgtccagtccacagagttccttgaccacaggcatggttgcagggactcccaactgaaatgttgaatcttctccatcttggttgctccatgaaagaagctgtttccttgcttcttttacagctgctcttgtggcacagtgaatggaagctgctagaagtaatggcggctcgccagaa

SEQ ID NO: 5410 - DNA, 804 bp, Glycine max
taggtttacacaatatttttctaatgccattgcaaagggtgtgcccatattgcagtgcccccagcccattgtcaaatcacaacttctgcacaattagtaagccaaaaaaaccaacaaaaaaaaaattaaggagcatatataatttagttagatatacatgtaatataataatgctaattgctaaactgccaatgtcatgtaaaattaaatccaaacgaaaagaagataacatgacacatgcaagttagttatgagacttgctatagcaacaagagaaaatcaagagtttggtacagtaataaattttttaatcaatagttgaaccagtttaaacatatcattaaaaaaagagaagagtgtttttttaataaaacataccattaaagagaccttaaatttataattgattgagagtgcaaaattattttatattattattattattattaaaaactgttttacattatatatcaatgtatgagcatatattaaagtgtatatgatgaaaacccttaaattagtgagtgtagaagaggatttatgaggttatttatgtggccttactaacttgcattatttgagggaggcaaaggaggttgttggggacgcttgcgcttcttcttctcgtagctaattcccctagccttggcttgcgaatcacgcacttcgcgaaggtagagtctgacagcgcgagcaccgaaagggttagcctcaggcttccctccattctcttcaaaggcagctctgaggcgccctatgagtgcatccaggctcccccacgcttgccgtagagggcaagggcac

SEQ ID NO: 5411 - DNA, 776 bp, Glycine max
atctaatttgtgtgtgaccagcatctgcattatgagtacccctgtcgttcgacgcatttccgaatgcttcatcaagccacatcgtccaatcgaagagtctaaccaaatatgttatttagcaccttgggatattattctattgtcttatcactatatccagaagggtctactcttcaagaagcctccaacacttgtcgatcaacagaatttcatagaaaatctgttggagaagctcaaacactctctttcgttcaccctctcccatttctatcctttggctggtcgccttgtcacccacacaacccaagaccctccctcgtatgcttttttcgttgattgcaaaaacagtgatggagctagattcatctatgcatctttggacatgaccatatctgacatactcacccctgttgacgtcccacccattcttcattcattctttgaccatcacaaagcagtcaaccatgatggccacaccatgcccttattgtccatccaagtcactgaactagtggatgctgttttcattggttgttccatgaaccacactcttggtgatggcacttcctactggaatttcttcaacacatggtctcagatctttcaatctcaagctcaaggccatgaatacaatgttcccatttcacaccaacccattctcaaccgttggtttcccagtgattgtgatccgtctgttaatcttcctttcaaacatcatgacgagttcatttgcaactttgaagcaccttttctgagggagagagtcttccactttt

SEQ ID NO: 5412 - DNA, 690 bp, Glycine max
agttggtggcaagaatttctagtctaatgtactcactcatatttatgctaataatcctaactaaatacggaattaaattgttggaaataagaatattttaggagatatgagtttctttaatgttatttttccaagtagcctagatacatggtatagttaggttcaatgcatctaaggaagtagtggtatctttattgttttcttatgaattgttttggcattggtacactcaagaaaattcataatatatttgtttctctgttatcagttctaacacaaatcataaaatgttagaaaacaagtaaattaagaaaatagggaaactaatcccaagagatgatttctaacatactctataatattcttaaatcttaagatatataaacgtgtgttttggtaggcttggagtgttatatgtttacattgtcctgttttatgatttaaagctgaatccctctatggtttttctcataatggcatcatagaatgcatccagagatttgcaagttcccttcattgcatttctatgacaacaaattactgaatggcaaccaaatgtctaacaaatcagcaccatttcatcaaaccaagggtcttgggccatatgtattctatgatatcattgatggccaggagattcagggaaaaaactctggtgtaatgtcgctttgtaatgaacaggaagcagat

SEQ ID NO: 5413 - DNA, 680 bp, Glycine max
gcctgcacgtcatcggttaaccagtctacattgtgggcaactcattaggaggatatgttgcattgtattctgcggcacgtaaccctcatttagtgaaaggtgtcacactgcttaatgcaactcctttttgggggtttcttccgaatcctattaagaatcctggcctagcaaaatttttaccatgggctggaacatttcccctaccctctaatgtaaagaggctgacagagttggtgtaagtatcatttattttattcattgcttcatttgtgcgttttaggtagacatgttttcaatattctagttatgaactgctatggcacatttcattaatctaattgtaacccgcggtcacattcctatgtgaatgatgatagaatgagaaactctgcttaatagaccaagtattctatctgagaagagaaaactaaaagctttttcactagaagaattgtggtgttgtgaatttgtgataggtaccttgttaatgtattttgagtaagtaacctttgtaactagcttcaacgtcagactgtgttttgattgaataatgttttttcttccctttaggtgggagaaaattagtgatcctgcaagtattgctgaggtacttaatcaggtttatgcagagaattcaacaaatgtagatagagtattttcacgcataattgaaaccacga

SEQ ID NO: 5414 - DNA, 800 bp, Glycine max
agtggaggagaaagaggaaaacataagtggatgtgggttgccagttaaaaaaaaggtagccggaaatagcagttggttgctggaaaatgggtctccagaaacagaggttgggtcacgtggaggtaactaagaggaagaaataacttttcgagggtatttttcccctttgaaggctgatgcacaactacaatccccaaaatactcccaatcccattaacgatcacaaagtaagggcatttaaggaagagggatttcatttgaattttggagttgcgcctgctccaccgctaactgctgcggattgttcctttgattctgctctgggatagtggctgtgatggctgcactacttaaccaagacactatagtcttgtcatagcagctaggggccatttggctctgctctggtgctacagcgatggtatttgccgctattgacaactatgtgcctaataacttccaaatatagaattatgaatgcttaattcagaacttggtccaatatagaaataaccttgtcctcaaggttgaaataaggaaattgttccatgcagatcaacatttgaatttggctccatcaattcaacctctttgaactctccttttttgccccatcatcatcttccccccaaataagcactcaacttcctttcaagacatccatgaagtggccaaatcgttggccacaggcccacaatgaaaacaacaaccttcttccctcttcctaacatactcttgataagataaatgcctagtgctggggttttttgtatctgaacgatgaatttcatgaataacta

SEQ ID NO: 5415 - DNA, 720 bp, Glycine max
ttgagcagtcacaggcaggactaaaatcgctctccttctctgagaagacaataaatcagcttcgtgaaaactttgtctccattgagaagtatgatagaattgagatggactgaaactgttatcacctattagagggtggttgttttctcttgtgtaaactgtaaactgtaaacttaccattgactttttttccatttgaactgactttgattttctgatttcttgatgcatcagtttatgtcaggaatgccaaacattaattgacaaccatgatcagataaagatacttagcaatgcaagaaataacttaaacacaaccttgaaggtgcttttccatccttgattaaaaggctaattgtctaatactcattctactgcttcatagttaagagttgttatttagaactttctccctcccacttttttgcagtagtattgagcttgctatctacaactattacaaaatggatctttcactttataccctgcataatcatggttaaagtagaagatgcagttatgtattgagagggtatcccctcaaatgctgccttcattgtgtcaaacatttataatttagttaatttttctttgttagaaacttagaatgggattgatacaacctgcaaatttcagtcatttggcctcattttgaataaacatggttggaacctagttgtaatttttctttgttagaaacttagaatgggattgatacaa

SEQ ID NO: 5416 - DNA, 792 bp, Glycine max
atcgagtagcggaattgtggagaagaagaaaagtagtaggaagaaattggaatggtgggaatccatggacgatagtggagttttgaagaaggaaaagagaaggcaagcgagggaatggtggaaggaggagtattcggaggagctttcaaggaagaaaaagaagaagaagaagaagaagaagaagaagaagaagaagagaaagggtaatgatgatgatgatgatgataataatgtggaggtagatgatgtgtacggtgatgcacatggttacaagagggagaagaaccggagtaggaaaagtggtggcagtgtagattcatggttcagcggggagctacgtggaattgggtggaatagttatgattcagcgacggggagtggagagatagtagcaaagagtgggggtgtgagtagcactccgagtatgaggggaacggttttctacgttgcacccgagtatggttacaatggggatgcgtcagagaagtgtgacgtgtacagcttgggggtattgttgctggttattgtatcagggaggagaccgcttcaggtgagcggttcggcgatatgggagtataagcgtgcgaatctggtgtcttgggcgaggcaatgcgagcggagagggaagcttctggaagtggtggatgagagcgttgaagggttggataaagagcaggctagtctgtgcgtgacggttgcgttgatgtgtttgctaaagtcacctgctcgtcgtccttccatgaaggaggttgtgggaatgctcagtggggagatggagcctccgcagtactc

SEQ ID NO: 5417 - DNA, 772 bp, Glycine max
attggcagaaaaataggcgaatgctagtaagtcactcaatatacataaacagccattactgctttatgccttatgaactttccgattaagagttagctttatttcttaccctgttaactgacaaactatgtgtattataattatatattctttagtgtaagatgaattgttctttatagatattcttcattgtgtatatacatttggtaacctcttgtctgactttgttttgacaagttgctgacccctgtgttgacaaactacggcatttgaaattttttttcttttcaataccgcaggcctattctacagtcggaacacctgactatattgcccccgaagttcttctgaagaaaggatatggcatggaatgtgattggtattatctaatgtgtttttctacttttccttttcaaaaataccttgaagttccctttgtttttctaaacttcatattatttcaatatgttctgatgagattgtggtaatgtttccaggtggtccctgggagcgataatgtatgaaatgttagtggggtatccgcccttttattcagatgaaccaatgttgacttgtagaaaggtaatgtctggatcaactgtcgacaaattgggatgaatattgtataaatttaggtttcacacatgtaggatgttgacttcactgaattttggtgggcacctgctcctagaggaagcctatattgcaaaattagaagtgaatgctaagtaaacttactaatattgtttacgaccttatcattgtggtttta

SEQ ID NO: 5418 - DNA, 810 bp, Glycine max
ataatttcccgcggtgttgctttttaaaatctatctaaagattcaggagcaaaaggtaggtgcaaatgaataaagattgatagagtatccttaaggtataaatgaaaaaaaataaaatatcaatcgtattaaaaaaattgacatttttttcttaacacttcttaactattgtccttaaaatggctattgaaagaaatccaataaaagctgaaatatatcattaattggcttgaagttagactcatataacccatacctaactctaggccgaacaatggtatttcaattttccaagaactaaacaaaaaaaataaaaagacattttcaattttatagtaacaaaaaacatatcttggcgacgtgttattctttttctaccttacatatgttcatccgttttactaatcaaaggagagattcaattgttaagtgttttttttactgtatcattgatcttaaacggatacaagttattttcattgtgtcattggtcgtaagactaacctttctttgcttatttttttttaataaaatcatttgatctatcaaattgctttttataaagattacaaaacataactcttccctcctgtttttttatttgtcttttacaatcatcttaccgttaattgggattctcacccttcacaattgaatgataacagcactatttcgtacccctccctcttgaacaacatgggggcaaaatgttcaacccgtgtaggaaatataattaactttacgtgcaacaggaacaagagacatcagagccagcaccagtggctagcatataactctgttcccacacat

SEQ ID NO: 5419 - DNA, 751 bp, Glycine max
aaatttccctatccctaacctcctctacagaatcaaaataaccaacatctttagtttcttcaacttcattgcctctgaccacgtacttttcatctttcccttcctcatttcgaccagaacccatattcactccatcattcttttttcgctgattctgaaacagatcaggcatgacagaaatgtcaccactctgcaacaaaaaatcatccaggtctcgcgatccaaatgccacggaagaattcataaacaaagagttctcgtttctcacttccggctcctcaaaataacctttatttttccacaaatacatttcatttccaccatcaccatcactaccatagtcatacatagaatcatcaccctccgataactcctcttcttcctcctcctccttttcttcctcctcctccttttcttcttccacttcttcttcttctcttttctcaatttccaattcaaaaccatttccaccactcacttcaccgttccctttcgactcttcgatccgatgattaagcccgataaactccgacgaatcgagcgctgtcatagagagctcctcactgcaatcaccgtacatctccaatccactggaaccgtaccgcaaactccgcctccggtcgccgccgccgccgcgattcacctccgcggctccttttcccaaactgaaattctcgaaaccctcgccgccggcagaagcgaaatcgcaatcggagaattcgtggaagagcgtaacggcgctgcaggcaac

SEQ ID NO: 5420 - DNA, 692 bp, Glycine max
aaggagcagtgagggttaagagaaggagaggaccacacagaggggaagatttcaccttgacacaagcattgatcaaagcagacttttggcttcttttcatttccatgatcatgggttctggatccggattgactgtaatcgacaatctgggtcagatgagccagtctctaggattcgacaatgcacatatatttgtttccatgatcagtatttggaacttccttggccgtgtcggaggaggttacatatctgagcttgttgtgaggtaaaaaaaatcagtttatacattgattgcatgtttaattcagcttattatgctttttacacggtcaatcaatttttatagcaattatacaaaagttaataatcttatcatacatgacaaacgtgatataaatatttaggtgtacgatgtatctaacataactacttatttgatttcaaatttcgttgtgtttttttcttgagcagggatcatgcatatccaaggccagttgcattggctgtatttcaactcattatgactcttgggcatgttttccttggtatgggatggccagggtcaatgtatgttggcacgttactagttggacttggttatggagctcattgggcaattgttccagctacagcctcagagttgtttggtttgagaaactttggtgctttgtacaatttcattactatagcaa

SEQ ID NO: 5421 - DNA, 153 bp, Glycine max
tatgtggctggaccagacatttaccagtatttgataacaaagaagcaaacccttccttaagaccaacttctccagcagtatttactgagaatgtatccatttttgcagcttttgtggataaaatatcctctctagttttcaggcttttccact

SEQ ID NO: 5422 - DNA, 704 bp, Glycine max
accttgtgttaatgaggcaggatgtaagacagagattccatcatcagatagttctgttcatgtcgaggctccaatgcaattgcacattgtgagtcaataacattttctttttttatgtatgattttagattgatacttttgggaggagacatagctaagtttgtgttgagtatttagtttcttcaaaaatagttacaatttctaaaatattaatcattgacaatttgacattatcctctgttctaataattgtttctaatttgcagtcaactgctttaatggagagttttatgaagcttgccaagtcaaatacaaaaaaaaatttagagacttgtggtgtccttgctggtttgcttgtaagtttttcactttttctttgtcttaaagtaaatctataagcaaaaatagatccaaaagggttttgggatccaaaaattgaattttgcattaattgactaaaaaaattattaactacgttttgtatggttatgatcttgtgctaacacgatggcacttttcttttaactttttctatttgttatggatcaacctgtcatatgcatggtatatttatatgtactagcttgtaaaattttccagagtttagttgggctccgatggtttagtctctcttgtcttctatattttatgttcaactgttagatactgattggaattttgtttaacacatgatctgcaggcat

SEQ ID NO: 5423 - DNA, 824 bp, Glycine max
aattcacacacatcatgatcttgtaatcatcatctcccaaatcagggatagccttggccttcttaccccagggattccataccactgcactctcattatcaccaaaccaataagtgacatcaattgtagattaaattaacaaacttatgtaaatctgaatgctggatctggcccttataaagtgaaaaacacgttgtagagactaaagtaagtaatccccttgtttttgatgaggaaatgaacagttgatattatgtgcacttgtataacaaaacatggatattttaaaatatcagtcgttgattttctcatcaataaattaggattgttttactctctaaagtgacttgttcagattagaagagccaaatagatacaatgccatgcaaaatttttattctctgactaataactaataacaacctgcatctggcattcctttcttctggagtacaaaagttctttttttctcatggtctatgatggcaattttagttgggctgtgcaagtacactctgtccatctacaaggtaaccacaaatgtccttagagaacacttgaaaaaaaagttgatttggtatctattatatatattcatacactcgaaaatcaatcagaatatatataggttatgtgcacttatgtgcttatgatgtcaattttcttagcctgtgagacacctccaaccaattgaatgaaaggaccagaaaatcaaattatacctctccatcaaaagtgagtgcatctgcctgctctgtgaaccttgatctgttcaacagattgtcaaagtaatccagtgtctccaatccctcaatacgcacttc

SEQ ID NO: 5424 - DNA, 774 bp, Glycine max
gagcagtgagcagtgagcagtgatttaagaccaaagaaccacacgcaccatagtcgctgtgagaactgcatatgacaacattcatacagcaatccatgcagtgttctcaaggtgagtattgtaatgtgaatacatgtaatgattcaatatctcatccataacctatgacatatgatcattaatctatgcacgtgttagtctctatgcattattattgaccaaaatgacaataaaacttgacaagggacatttgacaacagtgtccaaaatttgatcaataggatacgatgaagttatgcacttaatgcttattctcacagtttttgggagaatgatgaccatgagggttctctaaaacatcactcttttaaggctatctatgaaaatcccaacctacccaatattcatttgggacttatagtaaaaggaatagctatcaataatgactctcctaaggggacctactgtaaaagtaattaactggtactcaattggaggaggtagggggagggcctcttgcgtgcatttatcagagaactgccattcccatgtgtcttaagccattggaataggccaacaatattattttaagaactataccctatacccttatcattaattttcaacataatataactgaagcggaaactccacctcaaatttaattattgattttaacaaaatgtcttgcatagagactaatggtcaaatatatccaatttcctaattctcaagaataattgttggtcaaatgtatctgataactgattacat

SEQ ID NO: 5425 - DNA, 778 bp, Glycine max
atgtggtgtaaaagtgagaacacaagcatgtagagacatgacaatttttaactaaattacctaaactataacagtttttaaaaggttctcaaatgatttatttttaaaattgtcaaatagtttagtaacctccaaattaatttaactttttttttcatatacaaaatccaagggaacaaactagctggagtatggattcactcttagcggtgtttcaaattatgattgcagttggtacaattgtgagttttacaattaattattgtgcttcatattcaaaatctcatatttactactcttctctttgaaatctcacctttcttttgttatcactaactcaccaccatcttaaaatcctcctagcccttatacatccattgcacccaattcatccattgcccactaatgaaaactgttcctacctcttcaagtccccatacattgctagactctccggtttctaaggtattgtctgtttaagtgctcagtgaacttttgtccttataaaagatgtcttggtgggttgagaggagatgatgtttaattttaaacgacctgtgaccttaattcctaagcaatgagagactattggaaactagtcaaacttcgttttaattcaatcccaacctagatgattgttagggaaaatggttaggaatttctgtaatagatatgaccttccatcgtttaggtttaagatgattgtacatgagtttgattcatgtcctccatgcttttgctttctttattttattaataatataatatattagggtgt

SEQ ID NO: 5426 - DNA, 723 bp, Glycine max
agctgtcaagttgtctggagatccttctgaggtatgtaatatatcacaattaatataaccatccttgctccaagttttgagaaattatgctatttattaattagaatgatgctaggggctatcaacccagcaatatgatatatgaacagaggaatctgagtaggtgctattgtctacaatacaaatcacatgattttattcaactactattcttattcatggtccctcccctcccccttttaagtatgtgcttattggtgttcctttggattatggagttggtgaatgagttaaggaagctttatacaatgttggcactcattcctaatcttaactgttatttcttgatacgaaggtataccaacttctcggagatatcaagttagagtttcatgattcccatcttaattattcaaaagagtcatattatagggagctggatttggatactgcaacagcaaaaataaaatactctgtgggcgatgtagagtttaccagagaacattttgcttctaatccggaccaagtgatagtgacaaggttatctacaagcaaacctgggtcattatcatttacagtgtattttgatagcaaaatgcatcacgattcaagggtaagtggccaaaatcagataataatggaagggagatgtcctggcagtaggatcccaccaagagtgaattcaattgacaatccacagggaattcagttttctgcaggcat

SEQ ID NO: 5427 - DNA, 816 bp, Glycine max
tgcctgcaggtaatccattttcatgtaaatgggatctttgaactcgtacacatgcgtatgacacagcaagaattccatttactgtgatccttataagcctttaatctgctatatacttatgtttagaaacaattttaacttttttatagaatacacaagttttaagagtcatcaaatactcaattaggaaaatatagctttatcttgacaatactacctttcaattctaaaaatgttgtttcactcagtgggtatattaaaaaaaagtaatgatgaagttacagaatgtaattaatgtttcttcggtttttaaaataatgatttaagacaaactaaaagcataaaggtgacaattattttgaaataaagtgagtaattgtttgtctagttctaatacttctccaatttttttatttcttttctatcatgagacttgcaagtgaaagtacccatacctataaagaaaaactgtcaactagttttgtaaaattaatattaattaacaatttgaaatgaaaaatatttatttttatttgtaggaataaaaacagatattaaaaaatctacaataatttacactcaactaagttaaattaactccctttctatttgaaatgagaagtactaattaagagtaaaatatttagtttattagaaacataaacatattgttcattcaatacttgctattgcctatttagtaaggacacgtttagcaaaataaaacaaaacaaaaaggccacaatcctcaccaacccggttattgttttctctgattggtcttctaagggcaaggaacgtattatgaaacaacct

SEQ ID NO: 5428 - DNA, 651 bp, Glycine max
ggcggtgctggtggaaactacccacctgcgtacggttcttatggtggaaattcaaattatgaaacggatgtggttcctccgcctgcaagctatacaggtggacctgcatctggtcctccatcatatgggagtaatgccgtaaccagcggcaacaatgtagctgatgcacgatatggtggtaggtccgggccaccagttggaaatgacagtggttatggtgctggtagtcaaggtggatttggtggagctcccgctgagccccctgctaaggtgaagcaatgtgatgagaattgtggggattcctgtgacaactctagaatctacatatcaaacttaccaccggatgtgactattgaagaattgagagaactttttggaggcattggacaagtaatgttctgatctgttgacttctgtacgagctctataaagagagttatttgttctttgagctatggtttgcatgaaaatgccctttttcagagtaaattaacttattatccattttcttactgagcaattgagcatgcatgtgtatatctgagaattcagctttatttacgcaagaaatagttgaccacccgccccccctcccgggatttctgagcatattgttcatttctcttgtggactccatgggcagaacatgct

SEQ ID NO: 5429 - DNA, 275 bp, Glycine max
aagggtcttcgtagacaagacaaccatcacccttgttgtttcctttctcatcagtgtatagctttatgttccaaggccactggtctttataccccctcttctgttttattcttccaacctaaacagttacaaagacatgtgagtatgaagctcgacacattgccaaaatcagatatacatatacaggaaccaaaatctatagcatgttctgcccctggattccacaagagaaatgaacaatatgctcaggaagccgggggggggggggggggggg

SEQ ID NO: 5430 - DNA, 737 bp, Glycine max
acagggttgcctctgtattataaactaaagcaaatttatgctctctgtttgtggtttttattgtttatcagattaaactaccttttgaaaaactcatacatgctttgaaaaacttccccgaggatgcaataaatctagatacattgttaccactcgcttattctatctaggtcctcttcctttctctaactccttgttatggactatgaatgatatgaattggagcaggatgcacattctccttcacttcataacttccacatacattttatttgtcaaactcaaagttactttcaaaattgaatgttacataatctgttacttttaaatctcgtatttatttatgtgattaatcaagtgataactgtattactgatacattctctaagagttggtcttattccaagatatctaactgcattaaatctgtgagtagaaaatgtgtctccatatagttttttgcacagtctgagcaaaaatggttttactgggcaacgggccaaacatttttttaccttgatcattgtagctgctctcttacctttgtcaaatagttggactagggattaaacatttattatcttgaacatgcagctcaaatatagagcatggcctatatacccttttaatctggcagtttccatgccaagatagttggacttggttttttaatttggcagtgtccctactctttttaccttcttggctgacaccatgatgcatattttttcagctat

SEQ ID NO: 5431 - DNA, 749 bp, Glycine max
atggagaggaagaagcctgaggagaagaccttgagtagttttggacacactgcgaggtacagaagatacaccattgaggaaatagaagaggcaacaaacatgttctcggagtctctcaagatcggggaaggagggtatgggccagtatacaggtatgtgaactattgttgtcagatactcttatttaatcatgttgtcagaattgtcattaaacataaatatttggatattaagtagacatttttattgatgagtgggtaactattgttgtctatcttggataacaaaaaatatcgaatgtactaatacttgtaaacaaagatatagttagaaaagttgtgaatttagtcttggatttataaaacatgtatgttttggaattgagagagtaattgttagtttttattggcaaagttcaaacgtgtgaggccacgatctctcccctctccttcctttcgaccattatgactagatcaaccttataatatctcatgtgcaggtgcgaactagattgcacccaggttgcaataaaggtgttaaagccagatgcagcacaagggagagagcagttccagcaggaggtggaagtgctgagttgcataaggcatccaaacatggttcttctgctgggtgcgtgcccagagtatgggtgtctggtgtacgagtacatggccaatggaagcttggacgactgtctgttcccaagaggaaaatcacggccacctctcccatggcagctgaggttccaa

SEQ ID NO: 5432 - DNA, 785 bp, Glycine max
gcatgcctgcagcgatctggaaccttagctgccatgggagaggtggacgtgattttcctcttgggaaaaggcattcatccaaacttccattggccatgtactcgtacaccaggcacccatactctggacaagcacccagcagaagaaccatgtttggatgccttatgcaactcagcacttccacctcctgctgaaactgctctcgtccttgtgctgcatctggcttcaacacctttattgcaacctgggtgcaatctagttcacacctggggggaagaggtgccggcttcaaattagtccttccactaataaaattaatgatactaactatggggaaaaatcctactctcacatagaaaatataagtggaggacaatcctcctatttagactcaaattcttataagatgatatcaaagtctatattcaaaagaccattcatcatgttatccatgtactaagctaaaaagtattggaaaaatagagatagtagcaaaatagagtatatgaatggaagacaatcctcatccctatgagctataattttttagggttgagttaagttcaaattcttctaagcctaacaactattatttgttgataaagaaaaaaaatggtttggcacctgtatactggcccataccctccttccccgatcttgagagactccgagaacatgtttgttgcctcttctatttcctcaatgctgtaccttctgtagctggctgtcccgtgtccaaaactactcacgctcacgttcttctcaggcttaatcttcctctccat

SEQ ID NO: 5433 - DNA, 731 bp, Glycine max
gaaaagggcttgatatgaggaccttggaagaggctatggggcagacacttcttactctacctttaaagcagcagtatgtgctgttcatggaatggtttcgccatttctcaaggcatggaactgagtgcccaaatatgagcaaggcattccagatttggtggcgcagatctttcttaagaggctctgagacttatgctgttgaatcaagataaatggtactgtggtttctcatttctagtgtgtgtagagttggaataaattagacattttgaataacgtagataagtaggatcattgtcttagcagcttcatgactaactggtgtcaaattttctagattttttccccttcattatttgtttgcttgcctgagttgaatgaaaagctgaaggctcctactgtattttctatgactgctgcccatgctttgcaacttgattgggtacacttgggtgtaaatggaataatgctatgttgttgggtacacttgattgctgagaagatattcctgctggaagagggatgtgtataaagcaaacaaaccccaatctgcattgaatcaagagctttgactagatttcatctgctaataacctatttattttgaagatttgtacctaaccatttgttaagataagttatgagaaatagttatgcagatggcctatacggcatttttctttctttaggttttagaagaggaaaattggagttgattgaactgcaggcat

SEQ ID NO: 5434 - DNA, 731 bp, Glycine max
cagctacacagaatgattgcaggcatggtgggagctctggtagagcctggagcttcttgcacccaattacggtgatctctcgcaaatgaataagatctttgatgcttattggcaagctttaaatattcattaaattatgttatcaaatataaataattgccatttgtactgttatacataatttatatatataatttttaaatatgcattgttaacaccgttagatgtgttggatcctaaaattagaataaatcttgcaggttctatcataaacttgaatcagaatgtgttattaattcgtttaaaatagatatatacccaagctatcaatttaaatgttcaaataaaaattatacttcctctatccctatttataacacacatggtcaacaattttttttccttattataagaatttattttatcttttttatacattaattatgtttttactaaaataacctaagatatttctttctctctcctatgaataaagttaaaaataaatttaaaaaagtattataaattaaatactaataattaagttaactgacttttttataagcataaattagtcaattatgtcttataattagggacaaaagagtattgattataattaccttaaataatatgattatgtaattttatgaaataaaaataaaataaaaatatttgcatttaaacagaaaaaaaatatgtgaattactgttgttgttatatgtcaaggt

SEQ ID NO: 5435 - DNA, 845 bp, Glycine max
actcgagttactgcactagttaccacaatattaagatggaataataatggattagtgcagaattaatatccatgatgatatatatagactttagtttctagttaacaattgtccaaattgaagtatttttatggcatgaatcagaagggcacactttgatacatctcaggctttgggttattatatatccagatggatacatttagactgagagggactattgtgcccgaatcattgctcagcttcttaaaacgaattcgcccgagaaaaccatgtaaactagttagcagcagataccaatcaccatcttaagcttctccccactgtgccctacattgttaaggaattgaatgaccggcattggagtctgtcacaacatattgcacaagcacaagttgttcctgaagcaattgtaaaagaaatgttttaactctctgagctacacaatatgtcatgagagaattaaatctatatagaggctagatgcacatggagacaacaaaatttacttgttattacatacatgtggtgtatccgtaattccatatcaaacagttagcttaatattatagaataaaatcaaaaacctaaacaaattacataaagctctcgaattattttgaaatgtagtatttatgattcaagatcaagttgaggtatataatgcttttgagaggtggaattaacactcttccattgaacttatcggtgagctggatgaaatgttatgggactttgttcccttcgaaataacaaagatgaaggaaaacatgaaatggttagaagaaacatgatttcaaggtagagaataatgtgcatcagtatgccaagttctgcaggcatac

SEQ ID NO: 5436 - DNA, 819 bp, Glycine max
agcaagatgaactggcagggtttggggaggagtgaagaaaggaacactattctcttctcgtgggggaaattcaactccagcagactgccaattattaaaattaatacattacagaaattgaatatcaatgtcttagctccaatccaaatagaagcaatttaataatataatttgtgcgaatgagcacatacatatcggcacatgtattgatttattaatgagaaaatcaataacatacaggagcagatttaaacatttttgtgaagctagtccaacaatacaacttactaaaaataatctgggaagggcaggggaaacactgatgatatgtgaaaataaattttgacacatcataataaagtgcatgctaatgtggttctggattaaggcagcaattaaaaaaatatgttccaacaggtataaaacaattgacattatcattcattacagtatgtatgtacatgaataaaaaatagaatgtcaatatatacatatatatatatatatatatatatatatatatatatatatatatatatatatacacacacacatacatacatacatttaaaatagaattaccactttaaaatttagaataacactaagaaagcaatatcaaaatttacaacggcaatcacctttaattcattatatgctgcatggtactgtggatattttccacttggtcctccaaaagcttcttgccatgtatcaatcaaaatcaatatcttttccctcacacgtaagtctggctgtacaatataggattaaaaaaatgcaacacttgataagcaagtttttcatttgaaacataaa

SEQ ID NO: 5437 - DNA, 714 bp, Glycine max
ttcagaagatgatgatagtctagaatccaagtcatccaacctagaaataaatgaaaaggtaatatcataaatcctggatcatgataaggcatggctggccccaaaaacactataccatatgtagcaggataaccactataccaaagactatagattcaaaaatttataatttatactatatagaaattaaagataagatgcacaaaaataaaaattataatccagaattaatgaatactatgcaaaagttataatctaatctaattctaaacacaccatcattctcaatcaaaggtataattaacaagctaataacaacaaaaaatcattacatgcaaaagatacaagaaaaaatattcaaacatttcaagtaaaacacaagactagcaatggaatgggtagtttagctttagtggaaaagagaaattctttaataaatcaaaaagaattaatttcaaaatataggtagttaatatttgaattaaaaatgaaattttaatataaaaaaaattaaattcattaaagcttagatttgagaatttgaaattttaacataaaaaaatcataaaatatcttgtaagtggggttttatttttcacgtaaccgtgcaatgagctatattggatacctcacaaatttttcacattgcccacccacatattgcgacttgtaaccacagtcaaacatctttcaaccaacgattcatgtaataca

SEQ ID NO: 5438 - DNA, 684 bp, Glycine max
ctcattgcagcaagagcaccttctcaatcccattatgtcatcatctccattttcatgttttccatgactactcacccacgagatgaaagcgattctttgcctcattccgaacgagttctcgggatggtttggccgagaggccaaacaatcctcacacatgctgtgtgtctccgcgagtctctgatgatttgagcagtaaccgagcttggaaatctctgctgcatgagcctcacacacgagatccttgtgcaaatgcgtggcaatgtctttctgcaatacgtgatcaacccttgaacaccaaagacacggtggttggaggccaacacatttggcaaatattgtgatgaggtaactgaacaaagagtttagaagaaggagtgctatcaaaagccattcaagcactgcatagactagaatcacaaccattttgttggtgtttctatgcaacatggtagcaaacttgttggtagccattaaaatgcttccactttccagcctttgtttttctcttgtgacttgtgtggtgtgtgacactgtgagtgttatttggaagaagaaagagtacaaaatatagaatagaaaacaggttcagaaggaatgagtaaaattgggaagagaagcagagtctgagaaacgtgctagtggattcagtgactgtaccagtaatatgcaccgttaaagtgg

SEQ ID NO: 5439 - DNA, 806 bp, Glycine max
ctcgctcccgacttagttattctatacagtcgacctgcagttcacataatgaggagtctctttcttcttagagcactagactaaagcacacggcacaattaatcaaaattggcaacctattcggctgcaatataatagacttgtattatttgagcaacccataaaatgaatgaatgcttacaggttatcagaatctgatactggtatctggtatatagctatttttgtctcttcatgaaacccatactgtggtccacaaaaataaatgatagggttaattttgtagtcaaggttttcaataatgcaggctgctatactcacgcagtcagcgtacatttaataacagattagttgtagaaaatatcattgtcgcgagttgccttgaccttgagtaatcatacaatggattgagaaagttgattcttaacattcaacattttctgctgattaatgtctatatctttgctactttattgtgctaattacctctcagaaatcgaaatgattccaacatgtttccaatcatgcctaatttcatttctagttttcctttgggttaaaatctccaacctatatgtgcagcatcatcttcctcatgcaatgcaactgagttagtgtagtgaataacacttttacttaattatgtctctcttataggtttttttaaatatatagactgaaatgagagtacagagatccctcacaaattgataattgcatttaaaagtcctcaactattttactttgtctcaatattatatatcagccattgccaagaaattgttttgatctgagtaataatatcc

SEQ ID NO: 5440 - DNA, 798 bp, Glycine max
atcatttatctctgaatgagataggagtaactcttctagctctgccggagcaacctgaaatgtacagtgatatggttttcaatgggacaaataaaatactatcaattaggaaattaatatttgtaacagaaaatatcgaaacatttctttaagtaaattaacttacgtgattctgttttcagaaaaaaaaaaaaaaaacttacgtgattctgccatcaaaattgaagttttatttatgccattttccttaacccttaccctaattctgatcttaaaaccacatataaggaattgcatcaatatgttacaaatttttaataataataataggttactacctggtagcccttgtatttaatcaactctttcaacctatctacaacatacaagaaacctttgctatcaaaataacagaggtccccagtccttaaccacccatccaccaaagttgctgaagttgcttttgggtcaccagaataacctgatcatcatccatgcattgtgcgtgtgacaacaaacaataatcacgtattaatacaattttacataacaaaaataatgtaatagatgaaaacccaacaaagtcctgcattatactctcatgttaattaatttctaataataataataataatattaattacctttcataacataaggtcctctgatccagagttctccttgttcaccgggaaacatggcttcccctgtttctgggttcacaattttggcttctatatttggtatcagtttacctgttgctcccacctgatttgcctcctctggagtggttcgggt

SEQ ID NO: 5441 - DNA, 742 bp, Glycine max
ttcaaaattaaacttgaacagaaagtgagctgcttcgcaatgtgagtatatcgttccatttactggtttattttttatttttaatccctggttatctgcaaaatttatatagtcaagcttgagcagataattttttttgtttcctcttgcttctgcccattttggcatctgaaaatgtgtatagactgtagagttatctactgtttccttgagaaaaaactaagaaaaatgatttagaatgaatgtggaactgtgctttctatttgactttattaaactggatgaaagaaaatcactagtgtgaacctcttgcaatctgtacactctcttttgcatcataaggtgatgtaaaaatttctagttaacccaaaaggcagtctctcagtgtaaaaacaacaggtttctttaggtcctgggttactgataatatgtcaggatggtttacccatttctttttttgttcttttgttgtgtaagaactatgaatcatatcacttttgattgaagctctctgaggtaatattatttcaacatttatttctaccaggaggagcacatttgaattcaaaggtgtcccacgacaagcctacttgtgaattgacaaccatcacatataagattttgttccattttttgtgtttggcttttcctccccaagcttaaatcagaaaaaggttttctacttcattacaggcacaccataagcctggggacatcaaagcttacagaaagaaacattatt

SEQ ID NO: 5442 - DNA, 720 bp, Glycine max
ttcaaaattaaacttgaacagaaagtgagctgcttcgcaatgtgagtatatcgttccatttactggtttattttttatttttaatccctggttatctgcaaaatttatatagtcaagcttgagcagataattttttttgtttcctcttgcttctgcccattttggcatctgaaaatgtgtatagactatagagttatctactgtttccttgagaaaaaactaagaaaaatgatttagaatgaatgtggaactgtgctttctatttgactttattaaactggacgaaagaaaatcactagtgtgaacctcttgcaatctgtacactctcttttgcatcataaggtgatgtaaaaatttctagttaacccaaaaggcagtctctcagtgtaaaaacaacaggtttctttaggtcctgggttactgataatatgtcaggatggtttacccatttctttttttgttcttttgttgtgtaagaactatgaatcatatcagttttgatcgaagctctctgaggtaatattatttcaacatttatttctaccaggaggagcacatttgaattcaaaggtgtcccacgacaagcctatttgtgaattgacaaccatcacatataagattttgttccattttttgtgtttggcttttcctccccaagcttaaatcagaaaaaggttttctactccattacaggcacaaaataagctggggacatcaaag

SEQ ID NO: 5443 - DNA, 771 bp, Glycine max
ttattggcattacaaaaacaaatattagatattccattcccttaaatgcaagatgagaaaagcttcatgatgttaggcctcaaatatagaaagggcatgcaagaaaacagtatatgcacaacacaagatgttagcttgagctctagaaaaaagtgattacaaggttgtgaaaaaagaaacgatttcttttcggagattccatacgagtagaacatattttgcaagtggtggctataattatatgaaagcccttttattttgaaaagtgattttgggttttcaggtatatcaatgcaaaaatatttttttctctcaaaacctaaatgaacaagacttgtagtttttaaagttcagtaaggaatcaagtgattatatgtccacaagctatattcctattagcttcccgaaaagatctgaaatttgattattttcagacttttttggtcaaaagtttacccaaacaaattaaatatttattttttatataaaaaaagaagtgatttcttcacaaaataaccttcaaaacaagcctctaaagccagactggtaacaaactactatctagtacttaaaactagagtagaatccggaaaacctggttaaaaatctgtcagaagaaattcaatcccacaactaatatcaaattctatgctcaaaaaattagaattttcttggcctggaaaagaaaatccaaagaaatcactaaatggatcgtaattacctgaaggtctcgcatcggattccagtcatgctccacaaaaacaagggtat

SEQ ID NO: 5444 - DNA, 816 bp, Glycine max
aaggactaacaattgaatgaaccttgtcgtagtgattcttaaatgctggttcaaacccatctctgtcagcaagttctttccacacagcatcatactccaccaaggtttgcaacccggttgtggcatgtccattgaccacaatgtgagaccctcttgccagaacaatccatccaccctgtttgtcatagctcagaagcttcttgatttcctgcatcacgtggtcatcgtcgtctgtttgcttgagttgaagcttggagaagagcatgctctgaagacgggtccagaagaaccatatcatgctctgctctgaccagtattgagtgttgagcttatcacgaattatggtgtcaatgattttctgcacttgctcccttttgttgcttttcccaacatataccatctctaggggtatttgtgtagccgttgcaactctgcgggcttccttcacaaatcttcttacccattcaggatcatcccctccgaacaagaaaatgtattttccatccttaacctgtgcaatcagaatttgacattaattaattttcaagacaagaaaggatagtaacacattctgcattattctctggaatttatgttaaactcactaaatagagagtgagatccatgtcatatatatagtggacttgaatgtattttagttaatagtagtgtttaagaaaagagagtgaatgtattgctcatattcactctcttttgcaagatagcatgtgaaatagtccgaggttttaagcttgaccggtggatgaaaacatgtagcaatctatgttgggtcagttaatggtactacctacaaag

SEQ ID NO: 5445 - DNA, 787 bp, Glycine max
acacaaggatccttattttcattggaaagggaggacattgtagaaaacctcaatttcctttcttcaaactgctctccagcaaaccagtatatatcatcaaatccaataatataaacagtataaagctcaccatgggtttatcaatagttgatcaatttttagatgatcgataaccagtgatcagctaccacagtccccgttaatatatttgtaatgagttcattcgttcaagcaccattaaagcaacttgtaacatctgtctagcttttctatcaggagtgcatccatcattctccatttccttgtaaataatgggaacctgaccataatatcatcaatttatcagcatgaaataggcaactagattttacagcctgagtttcttccttttactaaaaagaaaattgcatattatcagaaaacaataaaaacaactttgttttgcagaagaaaaaagacaataaaataattgaagaattcacactacctcatcgaactttttggcccttataaatgccttcataagtgtagtgtaggtgaccacatcagggctaacacccttcataaagttatagcaatagcatcagggacttaaaaaatattgcattaatagaacataatgatgatatttccactgccaactagtaaggcttacactttcttttatatgatgataaacagacattgcttccatatatcttccagcattaccaaatgcattgattaacatattgagcatgacaatgtttggttcaattccctctgcttccataatctgcaggtcgac

SEQ ID NO: 5446 - DNA, 820 bp, Glycine max
agctgcaccacgcagaactcttgatgctcccaggctttgcatgaggctagcatggtgcatggcatgtcgtccaccaggaatggtaaactgcaattgaaagatcaacacataggaacgccaaaatttgaaccaaatatagatataaaaaagaaaattaagtatgttgctacttgctatagttacctggagaagagcaaatgctgcacaagccttgagtatagatgatggattccgtagcatagtgatgaatcttccaatttcagcaccactgagaaacaatcaaataaaatacggtagatatattaaaccatcatataataattgtgtaactccttcccgtcttaatggtccatgaaataaacatgtgggagacttctcagttaaacattatcattgagtaaaaaatgcactttgaaagaagaagaaaacaaaacatacttgtagataatttttttcacttcttacttaatattcactacactttcatgaagcaagcattcagaatatgattggtcaaaatatccactatatgcccataataaatacataagctgcatgaatacagatgaatgaagaaaagtgtaagtgctaaaaacttaaaattgtatgcactgttgcaacaaataaaattttgacaccaaatccacaaaaaccggagatggctttgcataatcagaaaataagacctttgtatgaggtagtaaggtacaactgtaatgaaaagagctacttttactagagtataaggaggggaaaaaaatacctgcatctcaaatgtcctgcttcttgaatgcgcgcaccttcagtaacctgtgctaat

SEQ ID NO: 5447 - DNA, 748 bp, Glycine max
tgcctgcagtcaatacatcatcatactcatcattgttttccccattcatcatgctttctccatcctccacggcaaaaagctcttcatctgtcatagcacctggaacccgccttgacttcacactaaccatcacatgaagcatgtcataaacttttgccttccaattcccaaccatctcagtcttctcctgacgcctccaatttaaatggggaacaagctcagcctgagtaacatcaatacctggtctatacatatttgtctgagacatcaaggaaacttcatgagcaacttcagactctgttggttgtgtaccagctccttccaaagcatttgtgatttccttctccttatgagaaagagcaatcaaagaaccaggtggcagagctaaattaccctcctctgcaacatagccctctccaaggaacaaaaatgtttggtccgatcgctggatgcgtaagccatcaaaaccagcaagggtcatatcagcacgaagattagacccacgcttccaaatccgataagtatctgaaggagctattcgcccaataaaaggaataacagagctctcaaaatgaaaacttatctccatataaaaatcacgaattcgagatgctgaagcaacaatgcggggaagtctacgacaccatttagcccaagccagaggttgataatgccgtgcaataatcatggcaattgcttcctctctggtgcacactgcttcttggagagcactccaaccatgttcatt

SEQ ID NO: 5448 - DNA, 890 bp, Glycine max
tcccggggaatccactaccatcgacctgcaggtaggattgtcattggattgtatggccaagttgtaccaaaaactgtgggtatgttattgatttcctattccaattcatagtctgtaacttagttttcttaagtaggaataggaggttaccttttaagtgaatcaatggtgagcagaccccttagaagaaattgcaaagtttgtgacttgtgagttatcctttatgtctatacttcagttttttcagtaaatttaacacaaatctgcccgatgaagctacctcattggatataatgtcattttacattagtaatgtttatattatcctggtgcattgcaattttaattgattgaaaatgttctgtctacagaaaattttagagctttgtgcacaggtacttgaagtcttcatgttgttttgttaatttaacctccatcttgtttacatactgatcatgagtattgcatattctgtaggggagaaagggaagaatgccagtggtgtaaaacttcattacaaaggaatttcataggataatatcaggtttcatgattcagggcggagatattgttcatcatgatggtagaggatacgaatctatttatggtggcacctttcctgatgagaatttcaagataaaacattcacatgctggtctgtaacagatatgcttggatgcaagctttttacttttttctttaaaaaaaataacttcacatttttcttcatttttgaggtgtacgtttaagttgtttccatgtaaatatacttcactgttgcaggtgtagtctctatggtgaattcaggtcccgattacaatggctcacagttttttattaccacagtgaagaccggttggtaagttattctgcccatgctgcaggcaaac

SEQ ID NO: 5449 - DNA, 725 bp, Glycine max
ggaagagtaaccaagaaaggcatattcaaaatagttttgcttctctcactctcttcttaacattttagattggaacttatgaaaaggaccaagtcaaacttataatttggacctcaaaataaggattatagctagtacctctgaaaatatggcctttaaccaagccaaataacgtcatgtaatctatttagcccacgttacctagtgggaaaaaggattttcttgttgttgtgtttgtagaaaaattagatacgtgatatcaatcccctttctacggtggtagggattaacatggataggaagtcttaaatttgatccttgatttttcttttttaaaaaaattgagctgctaggattttataataccttttaaatctcatgaggaatttagaatttcatagcacaagtcaaactcttatttactacatttacttgcactaaaccaattcaagcccctggccacaacagaaacataaaacaaacaaagaaaagaaaggtaattttaatgtaatcaaaataacacaagtcaaactctgattaactacatttacttgcactatatcgattcaagcccctggccactactagaaacaacaaagtaacataaaataaacaaagaaaagaaaggtaattttaatgtcaatgctgacatgttttacattttatacataaacttcaattagcaaaatagacttacttgttgtgttctgtcaccatgaatgcta

SEQ ID NO: 5450 - DNA, 795 bp, Glycine max
gccgagttgatagcaaaagaaaagcaccagagagaaagaaagccagaagaaggatcataagaggagagagagaaagagagagcacacaaaatggtttccaaagagcaaaagagagcagcactgcatgagaagctgcaaaatcttcgttctattactaactctcatgctgtaattccctgcattttctcctctgatatctttctttccattggatatatttctccgtgaatattctcaaggaaatatgccaattgcctaaaagaatgttcagttagacagtaatattgttgtacacttatatatactcccctctgctattcagttcctcttccgaatttgattccatttttgttaaaggaaacattcttcttctttgttatttttcttattattcaaatcttacatagttatatataataatttcctttttccttattgaactaatccatattcattctttttgcatcttcgactatctttctgtgctctcatttccatatctgggtagaaaacggaagcacaaaatgatttatgatgaatattaattattacaatataatatggttgaaaatagtgattgacaactttctttaatttaatatcatatgtcttgtaaaccaacgcatatatatatagttgtttcctatctatgcagcgtatttgagatagtaaattatttaattattattatatatgcatggtttatggcagctaaataaaacttcgatcatagtcgatgcatcaaagtatatcgaaaagttaaagcaaaaggtagaaagactgaatcaagagata

SEQ ID NO: 5451 - DNA, 530 bp, Glycine max
atagcttacacttcaatttcatcgttaaataagtactattaacaaaatagaatctaacaccagttcaacagtaagtctggaaattaatggaataatcttagttttttttattatttgtaagtatagctcctttgaacgttttacagtttcagatttacaatataataataacaaaaattaaaagttgtgtagatatcagtttaattttcttcacaatcactattctgaggaaggttttcaaaacaaattaatttcattgttatcaattagtagttatatcacataattcacgcaactatattctatgatatctagttcagaattggtatgtataaatgagtacataagtgtacgtgtttctttcatatattgtcacttcatttcaattcttttttttacgtaattccaaatcatgaaatctgaactcttgttatgaatttgatagtataatcctctataatctatatatatattttgtaactgagatgactaatatatatatatatatatatatatatatatatatatat

SEQ ID NO: 5452 - DNA, 834 bp, Glycine max
  misc_feature (253)..(281): n is a, c, g, or t
  misc_feature (808)..(808): n is a, c, g, or t
ttgctcaaatttcttaaaagtgaaaaaagaaaaagaaaaagaaaaagaaaaagacagtcattaagagtcatgtttatataccctttaaagttcatttaaatgattgttttcttcttgatgattatcttcttcaacatcatcatgtaaacagctagttcaggttggcttggataaagagggaattcaaattctcagtagatcgatcgatgcgcactaggaatcagtgcaaattcccttaatttaatttggactnnnnnnnnnnnnnnnnnnnnnnnnnnnnnatatatatatatatatatatatatatatatatatatattagtcatctcagttacaaaatatatatatagattatagaggattatactatcaaattcataacaagagttcagatttcatgatttggaattacgtaaaaaaaagaattgaaatgaagtgacaatatatgaaagaaacacgtacacttatgtactcatttatacataccaattctgaactagatatcatagaatatagttgcgtgaattatgtgatataactactaattgataacaatgaaattaatttgttttgaaaaccttcctcagaatagtgattgtgaagaaaattaaactgatatctacacaacttttaatttttgttattattatattgtaaatctgaaactggtaaacgttcaaaggagctatacttacatataatataaaaaactaagattatctcattaatcccagacttaactgtgaactgttgtgagattctttttgttaatagacttatttacgatgaattgagtgaagcttttgcngtcactttaagatcccggtccgactc

SEQ ID NO: 5453 - DNA, 740 bp, Glycine max
aaaatacaactgcaattgtggtcatggtgaacccaaatacctttatgttgcggccacaattgcagttgcacaccgcaattcaaaaccttgatatcaaacgaagtatatattgtttgagaacgtgttgttaattctcatgttcactcatactttattgcacactattggatatatcttatcatgtagtgaagccataatattgcatgcattgcctatcagtttattgaatggttatttgggaagaacatatttcatcgatgtatgatgtatcaattcaacaacatacccgtagtcacttaatctttaaaatttcatgctaaaatgtttcttatcatctatgttgcccctcttggttagcaccttatccttcagccctcctcttcagtttttcaccttagatttcttataagatattttcattgctgttatgaatgaagtgctaatttagcttgcagatccttggaagtaaatgaatagtaaataagaagcaaggagtttctttatatatatatttaaagtatttggaacttctgtttttgggttaaaaattgaccatttaggttatttttggtttcagaatttcgaggactttgttgttgggcacttctgccgccgagctcatgatattcttgagacatgcaaagcatacattgatggggctcaagttggttgtgtggtcaaaggaggggcacaagatgttgatcagggtgacaacagtagttcaatccagtttaggactt

SEQ ID NO: 5454 - DNA, 822 bp, Glycine max
gcatgcctgcagctgctggttcagttggttatattcctccaggtaaaaaactcttcaacttttatatttctattagtttttcgtagttcatagattaacttcatgtaactaccactaaacactatatatattgtaggggcaatgtggatcaaataggttttgaattccactaagtgaacaatgttttatatatattttaagcatagttgtctctatctcatttacttgacatcagttatatataattatttaatcactgtttctgttttagttacaattaacaaagataaacctgactaaattcatgaaacacttgagaatataacctgaaagttgcatttaacatttttgctcatgcatacactaccagtgattcagaattcgatgagactgccaagctattttagtgtgtgtatggtttcatggtgaaaagcatcagaattgatttttatctcctgtccaatgtgattttattaaagatatagatgttttgttattgttaggtaaaattaatttagcctccaaacctcagtttgactagaagttataaaaagtaacttttgtattgggttgaaaaatctgcattgagttttacatcaaacttgccttcaggatcaaaacatccaaacatataacttcactctaaaaccagtttttcaaaattaattttgcaatcgctcatccaaacacagactttgtatttcatagctcttaacctactttgtttgttggttggcagagtatgcatacacaatgacagtaacaatggctgggaatgtgtacagctttggtgtcattctgcttgaactgctgacaggaaaa

SEQ ID NO: 5455 - DNA, 807 bp, Glycine max
atatttgtattcttctctgtaggcagttgaattatggttggtgaataaagctgttctacccattgaaaattctgttggtggaagcgtccaccgtaattatgacttacttcttcgccataggctgcacattgttggggaggtgcagttgcgagttaaccactgccttttaggattgcctggtgtgagaaaggaggagctcagagctgttgtgagtcatccccaggttggctattatatatagttttttttttctatttttatcattgtggtaaagagtgaatagatataattcattatgtttcccatttgaacaaaatgaatgggtatgcacaattctgccttaagatagcagcaacttcacaatagaacaatttattagattacatcaatcatatttactgttctgctatgtagtaatggctaacctcaacatgccagctttcaagtgttaacttggtttacgattgcacagacttttgagacaactgactgtgtcaccaaactaagcttacctgttgacaacaaaatacctagccttatttagaaattttaaattgatactatgataattttacatgcaggcttttgctcaatgtgagacaacgcttagtgatttaggtgctgtcaagattgctgcacgtgatactgctgctgctgctcaggtgtattaagaatttcttgttgtctgaaagtaagcattgattgggttgtacaatgttctaacaattattttcttgagaacagacagtggcctcaaattgtgcaagagacactggagctattgcaagttcccgagctgcaggcagc

SEQ ID NO: 5456 - DNA, 750 bp, Glycine max
gcagacagcagtaaatggattcgtgatcgagtttaatttgaaagctcgtacaatttttttgttaataagaaattccaggtgtgtaaatgcagatcgacggtggaaagatttgttgtaatgttatttatttctttatttattttgtgttgaagttgcaatattattctgggtgtttttcttctgatttgacattgtatgactataaaaaaaaactttgcctaactaatatgcatgtttcattttcattcaattagtctctcaaccaaccagataactctcccttggttattattctcttaatttctcctaatttttaagaaaaaaaggattacgcatcaaattacatagtcattaagttaccatccatcattaaatttattaatttttaaaataattatcttaaaataattctgataatttatgattagataatttatgattagatgacaatataaaatataaatactcaatttttaatttcaaaattattaatttagtccctccggtaatctttctaacacatttaattcgaatcacattattgcagaacaagtttagcggtaggctcttttaatttcaccttacaatattgagaattcattattgtagttttgtacattcatcattcatcacacttggttaatcagaaaatgattgtcaatgtattgatacataagtgatatattgcaggtgaatgatttcaattagagttgtttctccatagaagtgtgcataattaggaacatatat

SEQ ID NO: 5457 - DNA, 838 bp, Glycine max
aggtgacattacaattactacagaaagaacaaagatggtggattttactcagccatacatcgagtctggtctagtggtagttgcatcagttaagaagacagattccaatgcttgggcattttttacgccgtttacaccaatgatgtggactgtcacagctgtcttttttctactagtgggagctgttgtttggattttagagcataggctgaatgatgattttaggggacctcccaaacaacaaatggtcacaattttgtggtaaggaaatctggtcattctctctctcctccctttctcaagctcactatattgagtctacccatgttggtgatacattcagtaatcatatcaaccaatgctagggttttcactctggatcacttagctctcaatatgtttgtaacttctatttgttttatttgacaggtttagtttttcaaccatgttctttgctcacagtaagtaccatatctttgtcttctgtgacatgtatggttcatgtataagtggtggctattttgagtttatcaacttgctcttttctgtactatgtaggggaaaatacagtgagcactctcggtcgctttgtgctgcttatatggttatttgtagttctaataattaactcaagttacacagcaagtttgacatcaatcctcacagttaaacaactttcttcacctgtcaaaggcattgaaagtttaagaagtagcaaagagcctattggctacttgcagggttcatttactcgaaattatttaattgatgaaattggtattgatgaatccagactagttcctctgaaaacaccagaagaaactgcaggcagacagat

SEQ ID NO: 5458 - DNA, 797 bp, Glycine max
tgcatgcctgcagcaagtggaggcactggtctagatatgcaagaccaagttaaacgcatcctaagcaagataaggaagacagattctggctcaaatggtaatggtggtggaaatatcaatatgctgcttgacaatgtaacgagcactagcactagcactaacactagcaaatatcctctattgagaagaaggcgtaggttgattgttatagcacttgatttgtatgacaataatggagctccggagaagaaaatgattgagatggtgcaaaagataattaaagctgtgcaactagaccctcaaactgctagagttacagggtttgctttatcaactgctatgccagtgatagaaacagtagagttcctaacatcaggcaatgttcaagtaaatgagtttgatgctttaatttgcagtagtggaagtcaagtttactaccctggcatcaatacagaagaaggaaagcttttgcctgatccagattatgaggtacatattgactatcgttgggggtgtgaaggtcttaagaaaaccatttggaaacttatgaatggtgatgagaacagccccattgaggaagatctcaaatccagcaatgcacattgcatctcatacaaaataaaggatcttagtaaggtataaatcaacatgacatttaccattatattaatttacataatggctagctgggcgcactaagagataaatgataatcatgtgtattaaaattcaggcaaaaaaagttgatgagttgaggcagaagcttaggatgagaggtctacgttgtcatcctatgt

SEQ ID NO: 5459 - DNA, 757 bp, Glycine max
aagattgcatatccctaagtgcagagaactgattagtgattagtgtagcaaaaggaataaagtagtcctgttgctgtgcgatatacaatgatgaagctgtctttattatgtcaataccatgcatggaatgcttctcaatctcttgctggatgtttgaatggcagtattgttgagattatggacacatctaaagatgactttctttaaaggaacaaaaggaatgaaacttaggtgcatctgtacaagacagttgataatattttatgacaaaattggaactgggtcacactaagctaatagatctaatggaactaatattcatctttcttccaacaataatcatgccaaatgttacacttgatgcagtcttttttattgtgaaactgatgcagtgttgataattatcacctatcagagcacatgcattttttctttaaaaaattatggcaatcacatacatttttgtttgatctattcttgtttgttgtatatgatggctccattatatgatgaactgtaatatgtggtttcctgatattgtatcttatgtaaatgtaaataatgttaatgttaatacattttgaaggctgaggatagagctcatcgtcggggacaaacaaatgcagttaatgtatacatattctgtgcaaaggtgattaggttctcctttctgaaggtttgggattagggcttgttgtgatatgcctaatgcctctcacaagctgcattttttggtatatcccatctgctggacaac

SEQ ID NO: 5460 - DNA, 815 bp, Glycine max
  misc_feature (465)..(465): n is a, c, g, or t
  misc_feature (467)..(467): n is a, c, g, or t
tttagttcaagagttaatttacgtggatgaattgaattggtgtcctctaaaatagaaggggcacacacaacacttgtcttataaagttaagttaagaaagcttaagttggtgaggttatggcgaacaggggagcgattaaatttgactttcagtagtaaaaaaactaatatggaggcgtgaggcatgcagaaaggacagataaatgccttctagattattgtatatttctttcatggaccattctaaaaaaattgcattcatcatctttgattcctaatcaaaagcatggtacccactttgatatattctaaagttccatgtagtgctgaagctagattagactatagtatgatgtcattactaattaataataaattgaacaattcaaaagtagacaaaattagttggtacggcatttggatagggacatttgtaattggttgaatatatgaatatatatatananaagccagaacataaaaattagactacaaaacaatatcttgaatagtttgagattttataaaaataaaaaaattacagaaattgaagaaaatagcctataaactgaatgtaaaaagatattagagtgatgtgtaattataaattattatgtataataaatttattaatatttataataaatatcttaaaaatcatattattttgatgtttgattgattgatatgaaaaaaaaaaattatatttacaatgcataaaaattgaactcgagtaattatctgttctttaattcaactatttttttcagctgccgtgggtgatggattcattgctcaagacatcacattcagga

SEQ ID NO: 5461 - DNA, 774 bp, Glycine max
tatttgtctaattgcatactttaaaatttgcaacatatataatattaaaaagcatgggagttcaaatgaaatgcataattttgtggtctataccaaaacagataagatataggcctgaagggccacttgtactccatggcatcacttgcacatttgaaggagggcacaagattggtattgttggcaggacaggcagtgggaagtctactcttatcagtgctttatttcgtctcatggagccagcaagcggaaaaatcgttgttgatggcataaacatttcttctattggccttcaagatttgaggtcacgtttatgtattatacctcaggatcctactcttttcaatgggactgttagatataatttggaccctttatctcagcattctgatcaagagatatgggaggtaacacctactagagctacactctgcttttctttgctattcagagcaaatatggactaattcttgcttaatataaactcaggttcttggcaagtgtcaattgcaagaagtggttcatgagaaagaagagggcttaaactcctcaggtgcactttcaactttcactattttaactatataatgtaagcacttcttcccatgttagtaatgattcgtacgaaattgttacctagttgttggagagggatcaaactggagcatgggacaaagacagctgttctgtttggggcgtgccctgttgcggagaagcaaaatattggtgttggatgaagcaactgcatcaatcgataatgcaactgacatgatt

SEQ ID NO: 5462 - DNA, 755 bp, Glycine max
ttctgaaaaatttcctgtggcttccaagagatcctggtatgtaaagccttctttaggaaagtagtagttatctaagacatgagtctttgtttgcccttcaagtgaaacaaaagcagcacggctacgccgcctcatggcgaaacatatacacactatgaaaattagagaaactagtccaaccaccccagaaacaatactcactataatttcccttgatgaaccatttctgatccagctatgttttgcagcatgagagggagatagagattgatggcagtgattggtaccaacacggcacaagccgttgttcccagcaaagtttgtgaaatccatctttctaaatgtagtggtgtctggaacagttcctaccagcttgttgttagatacattgcatattacaagactgagaaggttaccaattgatgaaggaatttcaccaacaagttcattgtcatttagataaagggactctagcatttgcaagttcccaaggctatcaggaattaagccagaaagtttgttatggctcaggttaagtgcaatctgaagagctcccagtcttcccaagtgaaaagagatgcttcctgaaaactggttgccacctagttccaggtctgtgagcctaataagattccccaaagtgcctggtatttctcctgagagcatgttatcagaaactttcaacagctccaagttcaccaagttgccaatttcatttggaagcatgccagtgaagtggttcctgctaagatcaa

SEQ ID NO: 5463 - DNA, 730 bp, Glycine max
cataaagaatctagttacaataaaaagcaacgagtagagatttgcaaataaactaacaattgtacaggctcatgtttcctaataaatagttagtttatgctggcaaagccacttaaatacattttgcatacctgtcgtacaacagctgatgtcacttctgagaaactaaggtcaggatatggcatgtcacagcagtatatctcccataagcatatgccaaaactgtacacatcacactttctattgtatggattaccatttagaacctgcccaatttcatcaggtaagtttcatttaccaatatataagatctgttattattcaaacaaaacatgaattacttttgcaaagccaggctatttatgactgatgtaaaatcagcataatgcatgctgaggctcatgtatttgaaagagttaaccattatttacaggagtactgaatatttaagcccaacctatttgtatattggtttttggttcccccttcaccctttcttgagtcgggcaattttaataaagcacaattctgaaaattgaaaataagaaagtatactccaattgagaagccatgcatttcaaaaagctacagttaaatgactgattaatctctcaccaaaagaggtttattttatagagactctcagtctcatctttagaatactttaaaaaaaagaaacacaatgttgagttagagatactgtaaatatctcaagattagtgagtagtga

SEQ ID NO: 5464 - DNA, 723 bp, Glycine max
tcaccaacaaatatggtgtaatctggagaatcgtcgtggcgcgacctctcaccagcactaaaagttgcccaattcaacctgaaactctgccccccatttggcattattgccccattatatgtttgaagaattctctcagctccagcacgactattaaactcaataaacccataaccttcagattgactagtttgcttgtttcgaattactttaaccgatgtaacctacaataaaacagaacaaacatttagtatcacgacagaacatttgcatgtctagctcaatacaagttttaaactaacaagtacatatgtttaaaaaaacatagaacagacaaacagaaaaccatattcacctttgtagaacacatttattaccacaaccgagcattcatgcgtctaactcaatacacaattcaaactaacaattgcacgtgtttaaaaaacctaaaacagacataccgaaaaccagattcaactttgtcgaacacatttattatcacaacagaacatctaactcaatacaaaactagaacggacaaagaaccatcttcgactttgtcgaacacaaataaaactgaatgaatacaaaatccaacctaaaatgctacaaaacccacacctcagtatcataacagaacactcttacacctaagcataaatcaacaagtacgggcatttaaaacaaaatctagaaaggttctaatttcatgctgcaggcagc

SEQ ID NO: 5465 - DNA, 692 bp, Glycine max
cagtgagcctgaggaaatctaatgacaacatcaaattgtcaagacaacactagatttgtagtcaaatagtaatacaacattaatctagactctactgcctttgttctgtgctaataatcagtacagttgtacactattttacaatgtacatttcaaacatattttcaagatctatttttcctccacacggaaaacaaagatttgtaggaaaagatgacccctagtatacagagcagctctatattcaaacatgcacaatgtaacacaaagactcttgcaagcaatggcagaagtacttcagtaagtatgaactgtaaatttttttgtacaacctacccactagttgcaacttgtcctttcctccttgaccttacaaccctttgattcacttgatgttttttattaggatccacaagcagcaagcatgacattacataagacaagagttcttcacggtgggagaaggtgaaatccaaatgtgcatattcgaactcattatatgaaacatctacaccagcacccttcatcaatttataatgtttctttaccattgaaggtcttatcactttgtccttctgtccagcaacaagatcaacaggaatgtctatgagtccgtagtgttcacccaagtccaaaggcataggcgaaccatacacttccatattggcggatgcactcccataatcaaacat

SEQ ID NO: 5466 - DNA, 744 bp, Glycine max
atatacttacagttgttggtgctgttatcgtaggatatgctacatgtatgcttcagctgggatttggatccacttctttctcaaaaacagtatgttttacttcaataggttttgtaaaaacagaaatttcaaaattatgacattttgcctgttgtaaccatattatgtcaacattattctgttttatcttggatgcttactgcatgttgttgagccagaacatgagcccaaatttacttagttttcaaaatcaagacttcaaatttacttcttattcagtttttaaagtggaatattttctcttttttaaatgtctttttacttgtgagggtgtgaggtgaaaaggcaggcttccttcatttaagggtctgtttggtttaataaatttttttttcctgattttataggtaattacaaaaaatatacattattttttacactgttttctattttcaaatattagtacaggaagggaaacaatgcaaacatgttgtctttatcacttgtataaatctttaaaataaaaaatgaagtgaaaaaatgtagcacctttgtaattatttgtgaaaagaggaaatggaaacaatttttttttctcaaaccaaacaggcccaatttcatccttttgctgtaaaatcttatttttctttgggctttggtatgtatattttagttgttatgtgatgctgttcattttaagaaagtacatcacccttgctgattggctaattacactacacaaat

SEQ ID NO: 5467 - DNA, 711 bp, Glycine max
atatatagatatgtaattttttttttccttttgggtttccatgacttgttcaagaactttgatcaatgacataataagcgactgaagttgattatgatttacaagtatatatatatatatatatatatatatatatatatatatatatatatatatatatatataacccattgctgattaccccaaagtaataccacagtctttactctctaatgttgattggaatgaataaaaagaaacaaacaaacaaacttgggaaaagtaattttttaatacaaaatcacaaatgctacctgtgcccatatccactttccaaataaaagaaaaataagatcaatggtgattttagtccgaaaaaatattccaaaaacaaatgctcctatctttattatgaaataaaatgaacaattattatagcagagcaccctgcaaatcatctactaaacattagaataagaagtggagaggatgaccttcttctcaggctggggcgaatctttagaagatgacttgaaaactttcttcacagatgagaaccagctgcctcctttcttccccatcaatgacgaaaggatctgtttctcgtataaccattaatttcatccatgtcgagacacaaaataaatctaagagtgtacacaagttgcggagcgagacatgaaactaacctggtgaaacaagtgttgccgttttgcatcacttcacatgttg

SEQ ID NO: 5468 - DNA, 758 bp, Glycine max
cttgcatgcctgcagccatgctggcatccaggtagaagatagtttttttttccctcccttctctaccaggatttattattataatcacaaatgagaattggtttatgggaaagaaattttccatagttcataactgtcaaaattggagggagagtgagcagtatcagtaagaagttttttgttggtttttctcacgtctattatttgaagttatgcaaaatcattcacctggtcttgttctaagaatacttttcaaggtttaaaatatcaatctttattagcaattagcattctggccttcccactttggtgtggttgtgatgtctaacaaacaagtatgtcttaagataaggacttgtttaattttaacacaagaggattacacatcaacccagagtaaaattctagatctgctttactagtatcttagaaaaatctaaacctttgatttttccttaactatgcatactttttttatattatcattcagggtactagtcggccagctcattatcatgtcctgtgggatgaaaacaacttcacagcagatggaattcagtctctgacaaacaatctttgttatacatatgcccggtgtacgcgctcagtatcagttggtaagcctgtgccttcattaatatggtggtttcagtggttgggcccagtatgactaccatgtcttccctcagactagtgaacagtttgtttttatgactggtgactttacccttatactggttgttgtaaaattattgctg

SEQ ID NO: 5469 - DNA, 773 bp, Glycine max
ccactcacatacctagggatgcctataggtgttaaccctagaaggaaggtgctgtgggagcctttaatcagaaaatttgaggccaaattgaataaatggaaccagagaagtatctctatggctggcagaattactttaattaatgctgtcttgacagctttgcctttgttttatatgtcctttttcagggtcccttcagcaatcattaagaagctcactgctattcaaagacaatttctttggggcggaaatttagaagaaaaaaagatagcttgggttgcatggaaccaagtgtgtgctcctaaagaaaagggagggttgggtatcaaagatatcaaggcttttaatagagctctccttatcaagcggaagtggttgatgtttcagcagcaagatcatctatggagcagaattcttacttcaaaatacaggggttggagaggcttgggagagggacctcctaagcagattttttcctcttggtggtctgatttaagatctgttactcagcacagcagcatggctgctgtcaataagcattttcgctggaatttgggcagtggtgatcaaatccttttttgggaagactcttgggtgggagaaggaattgctcttaaagataaatacccagatttatatcaggtaacatcccaaaaattaaagacagtggcaagcatggggatctttggagaacatggttgggagtggcaattttcttggagaagatgtctttttgacagcgaactggggggtgtttcagcttttattgacca

SEQ ID NO: 5470 - DNA, 897 bp, Glycine max
gttgcctgcagtttccattcatctacctagggatgccctttgggattaacccttaaagggaggggggtgtgggaccctttattcaaaaaatttgaggccaaattgaacaaatggaaccagagaagtatttctatggctggcaaaattactttaattaatgctgtcttgacagctttgcccttgttttatatgtcttttttcagggccccttcagcagtcattaagaggctcactgccattcaaagacaatttctttggggtggaaatgtagaaggaaaaaagatagcttgggttgcatggaatcaagtgtgtgctcctagagaaaagggagggttgagaatcaaagatatcaaggcttttaatagagctcttctcatcaagtggaaatggttgatgttccagcaatcagatcatctatggagcagaatcctcacttcaaagtacaagggttggagaggcttgaaaaagggtcctcctaagcagactatcttcctttggtgtctgacttaagatctattattcatcaccgcagtatggttgctgtcaattaccaattttttttgaaacttggtagtggggatcaaattttattttggaaaacttttgggtggggaaggactctcttttaagcccattttccgattatttacatttctttttaaaatttccaccatgcagcttggggaacttgggaaatggttggagagaaatttctggaaaaaattttttgcatggttggggggcttcttttttacacactgggcgctttaagaaccggtcccgcccaatctaaaattaactttcctggaaagtatctccaatcccacataccggataaaaaacggggccaagaaaaatatgttctctcctttcggaacggtcctttaatcaaaccgg

SEQ ID NO: 5471 - DNA, 843 bp, Glycine max
atgcctgcaggtgctacgataggtgtgaaatgtggccagtagtaggcaaggtcatgaattctcttcacaaattgaccttgaaggacagccttcttcatatgcccgtccggattgtttggagaagtcaccaactcaataaaggtcgagtttgaagtatcattattccacattgatgtgtccccattgaatttataatcctcagaattgaaaaattcagtttgctctttataaacctagcaagtcatgaaggcacaaaattgagtttagacaatcaagaagcattcatctccaatacatttttttcttttattattaattagttaagattttttaattaagacttacaagataagtgtcacttcttaattaacgtgttttttatatttcactttgagtaataatatataactaaaataatatatataaattatatctatccaaaaaataatgtagattggattaagtttgaatctaattaaattttaagataatattcgaatttattataatacgacttgttaagtctattagatcacttgtcattgccctattaatgatatgaatgaaataatataaatgggagaggtgaacaaccctcacctcatgaatataattagcttttgatgttgaattaaattaatttaacatttttagtgagtctctttggtaagttccaataaatttaattaattaacataaaaaaaattagttaaagtgttcatgagtgatagacatattgagagctgtaaatttaaggagcctagctaggtcatggttttcaaatttaccgggtaatatggggttgaagccaccacttttgtgggtgaagatgaagcctttgaa

SEQ ID NO: 5472 - DNA, 762 bp, Glycine max
tttagattaaatgaagctgagaacaacaacccataagaaaataatagagttcttacaattaggaactatgcaaggaagaaacttgaagccctcatcatgagcagaaagagtttgcctccaacctggatgacaatggcattcaaacaagagagtactattctgagaaggcttgcaagttccctttccacattccacttttttgcacacatcctctgaacacaactcacaatgcaaacagaacaggaagtcaaaaccaatttgagaagtctaagctacaaatcaattttaaaaaaagaacttgagaagatccataagaagaaaagtcatggaatctcaagcccgtgaatcaaaagcgacaaacacagaatcccaataaagaaatccaatccaataaaataagtagcaaaaagaaaaagggtcacttgcacaaaccatataatggagcgaccagaggacttagaggagataggaaatcacttctaactgatgaaagagtgtgcagaagaagaaaagcaatggcacttgcgaaggccatgctttaacgctgaagatgagagagagagagagttaggattcaattatataattaaataagtatataattataaggcgttagtgctctccaactacaatagctaacttttgtaacgcggttttctcaagattctttggtatgagagcctttcactggaaacaaatgatgcgggtggtgataccgacattagagtgttcctaatcaaagggccatcgcttggtcaccga

SEQ ID NO: 5473 - DNA, 856 bp, Glycine max
atgcctgcagttctcggtgaccaagcgatggccctttgattaggaacactctaatgtcggtatcaccacccgcatcatttgtttccagtgaaaggctctcataccaaagaatcttgagaaaaccgcgttacaaaagttagctattgtagttggagagcactaacgccttataattatatacttatttaattatataattgaatcctaactctctctctctctcatcttcagcgttaaagcatggccttcgcaagtgccattgcttttcttcttctgcacactctttcatcagttagaagtgatttcctatctcctctaagtcctctggtcgctccattatatggtttgtgcaagtgtccctttttctttttgctacttattttattggattggatttctttattgggattctgtgtttgtcgcttttgattcacgggcttgagattccatgacttttcttcttatggatcttctcaagttctttttttaaaattgatttgtagcttagacttcttaaattggttttgacttcctggtctgtttgcattgtgaagtgggttcaaaggatgtgtgcaaaaaagtggaatgtggaaagggaacttggcagccttcttagaatagtactctcttggttgaatgccttggcattccggtggagcaaactctttttgtcatgagaggggttaaagttttccttgctagtcctaatggagacctctttatttttatggggggggtgtcactttttaaataaaacgcggggcttttagggcccggcccgcccaatttaaagtgtaaggttcctgggaagtttccctcaatcccaaaacaacggaataagtaaccggggccagaa

SEQ ID NO: 5474 - DNA, 784 bp, Glycine max
acttaagtccgttaacaatagatactgatgcagctgagcatgcacaaatatagcagaatatatggccgcaagtcagagaaactggatcaaacacggtgtcctgtcacggagaagccagatgaacaatatcaatggataacaaagtgaaggacaatctaggaaaatgcttttccaaatcccataggaaacatattgttttacttttcgaaatctaaggtgatattgtcgatttactccatcttttttatttaagttgaatgctttgttttcgaaaagtgaaaatcactgatatttatgagataaatgaaaccatatacaaataaaacagtttattatgaataagcattcattgttttggtaagaacagaagttgacttcaatttaaaattcatgtgtataatctttaagtagactagaccctgcttgcattcgtacaacagtaatataataatattcaaatagacaatgaataacacactaaaattgaggcaaattcatccattccaattactgatattgagaaacttaccaagcatatagaacaagtcaagtcaatgtcaactttgatagaatcaaagagctcacaagtaagtgccggtttcccatccttgaatgtgagagaacatccatcgaacaaagcatgtgccttccttgacttgaccttagtttcccttaaattgatatggaaggccataagctcacaaagccagggactttgaagaatctccttgtgcatactctggatctgcgacttgaacaattgcccttgcttggaataatgaat

SEQ ID NO: 5475 - DNA, 680 bp, Glycine max
tgtgctttgaactgcttgattgcctgctagaacgctactttgatgcagttactacactggtagtcctaacttccctaaactcctatataagaatgtcaatggataaaactaaaagaaaatgaaactcctgaatatttattattctgtttgatgatattaatgttatttctcagcttcaaatgtatgttaagactttagatttatgtttttgatacaaccagtctcctttccttctgccaccacttccctgtatatacaaaatataaccagtgagtttctcaggtatagctttagctgaagacatcatagctgtgaagcaaatataagttggacaagtctatacaacaactatcgtggtgattggtgtctcattttatcaccatgaatacataattaaacatcatatgaattctctatgcttagtagatctttagtcttcttttgttatacaataactgtttcattgcaatcccattttgttatacaataactgtttttcatgattgaatataaagtcatatgtttgaaaaatgtgaattcttgtactgttaattaacttttatgtgagtggagcgtgtttggattagcttattttgggaaaataaattgtgtttttttaatatcttgagaacttaaaaaaatatttacagaagcatttagctctcaaatgtgggcatgtg

SEQ ID NO: 5476 - DNA, 776 bp, Glycine max
gtgtgtctgtcgcttttataaattaacattggttctgaacttctgatgaaagatttttgtgcagttatctaacgggtgtttccctccattttcgccaaaagacagtaatgaaaagaaggtacgttactgctacgtgttaacttataatagtgataaatatgatcataatgcgcaagaaacaatttggcccatttttcagtttcaattaagaatttgaagcctatcatttggccttagcttgctttcatgacaaacttctttttgttgtgggctaaatgaaatttacttttcacaaaaaaatcatctactaatccttgggaaattcaggcaagtcaatcatcaagtgcagtagatttattttcctcttgctaatagctgtgaaccatgaattacaaacattcacaggccacaactaccaaaccttgttttacacagtgagtgaatctttagtgtgtataaattaataacacagtaatctgtcatgtacaggatttacttttactccatcaagcactcaatccagaattcctttccagtcaaaatttgctcagaaatggggtatcttgcaatcaacctcatgattatcttcatcattatactcaaataccaactcaatctgttactacttatttgtttcatttattttgttattggtgcaaattattgctccccagctttacaggagcttgctaagagggaggacaatgggtaggtggttgaaagatcaaaaggagaggaaaaagcaggaaattaggacccataatgctcatttacac

SEQ ID NO: 5477 - DNA, 745 bp, Glycine max
gaaaccataatccattatgaatttaaaaattgtagtaaaagggaaagattaccatttatgtctacctctacaagacctccactagagttctgttatcaataaaattcatcattctttccttttatctgatccagttctatcagttttgttcttcatttatgcaaaagctaaaagtaaatatttttcccttgcacagattttaaacctccatcaggggatggcaaaagaacttatctcatactggccatcatcatagtagctggtgttttagtggttgttcttctggtgctggttctcttgaggaggatgggatggttaggaggcaaagatccagtgtataaaggtatggaatatgcccccaagttcttccaattcttttagttagaacaaatatttccatttgtttccagcacaacatcttttctgtatccagaagtatttgcctgagcttcttcaacaattttttaaataaatatttctggaaactttattcaaatgtcataaaactgaagtgcaacaatttacttctatataagatttgtaatttatgatatttctccatttcaccaaagtcaaggctttaagagaacatacgagagtatacttgcctgccctatatatttatatactagatagaaatgaaatgaactatgtggcagatattgtagagaaagttataaactttcttgttgaatccaaatttccaatcttttgttttttattttcagagctcaggggcatagat

SEQ ID NO: 5478 - DNA, 835 bp, Glycine max
aattggtagtaagcgatattcatgctagtgattgtgaaagaggctacttaaaatttgttgtaaagaatgttaaaatcttgaaagtcaatttcttgtaaggctcttctattatcttttatccttctcagataaaaaacttttgatattgaagtcttaagtattaaatgttacatgataagtttataatggatttatgaggtcctatgtgttttttaattaacttagagagcttaaaattttagtgcattcagttggagttttgatgattggtaaccctttcctccagattccagatattgagggatctcatacctcatagtgatcaaaagagggacacggcatcatttttattagaggtacattttgtaaaataattatatttttctagtttaaattgattgagaatatatcaaacaacctgtcaatctgtcatgtttctttgcaggtgatggagtatgttcagtacttacaggagaaggtacaaaagtatgaaggttcatatcaaggttggggtcaagagcccctgaagttgatgccatgggtaaattagaaaaaccataatgtttttgggatcttttgcttttaactgtatgcaaatcccttattgtataatactggtttgccaaaaacaatatcaaaacggttgtttagcatacaaaaatgctgacatgaagttagacaaagccattattgcaaaatgcaaatacgttgacatgtgagcacctggatgaaatgaaaattatcagttaaaattaacagaatagagatatagagtgaaatagaaacagtctttattttgaattacttaatcattatattggtctcagctgcaggc

SEQ ID NO: 5479 - DNA, 691 bp, Glycine max
tctcttcagcttcctcctcattatatcttttcttcattgcttcaaggaatggtctagtgtccagttcccccattctcttcaaacaaatattgccatgagatgatagctctttaatacccttcaagtgagagaaaagattacgattaaatcttgaaaagcaacattggacagtaaaaagtccaggaaagctttaagaaatgtaaaatattttcagataataatgcccacgaataaagaaaacatataagcagagaatattcacactatcacaattaggtctcatttgcagaatcaaatgaagtaatgaaccattaaaaacaatttgagtatcgagtttattagatgaaatagaactgatgagtttttaattttactcaagtcactttgctaccttgctatgaatcataatagttaacagttaaccaaatagaaaaaaatggaatgctctataaaaaaatgtaaatctataatttataataccatgtgtgcttaaattggtacagcacctaagtggtcgagtaaaatcaccaatagaaagaaacactaccagcccatgatccaagtgaaagaataatgacactggaatggacctcattgagatgctcttgcaaattaatttgaaaagtcagtaggaagatatatttgataaaaaaaacacttacatcaaccaatgcttgtctagcttcctgca

SEQ ID NO: 5480 - DNA, 761 bp, Glycine max
aaacaattccaaatttcttaatgggcaaacctcattaatgtttgattactggaatgaacacattgcaaatcaaatttgaaacaaacgaatcttcctagattgcaattttcaatcccaataaaatagtacatatttggacaaactggtattctcgtatatttacccgtactcattttttacaacacctttatcaaacaaaataagatattatctctagtctatgatcacatacgtgtgcttttttatttgaccaaagtaatcaaattagcattgtcggatttcatctttagaaccaatcggcatggagataggcacggcgagactttctaatgcaatgcacaaatatggaccattattattataatattatgttagattttatcttaaaattaattgaaattaagtgaagttttgcaagagatatttaaaacatacaccaataaatcaaagagatcttgctcagtttatagattgttgtaaatccctaataccaaaattcgagtcccactgctaatattaaaaaaaaaaaacattaattgagacccgccaggtggaattttccaacaaacatgatgaaattaaacatcacattagcaagatccatgcatgttcaactactacaatgcacaattaaatgataaaaaaagaagaaaaaagaacatcatcaccaatcccacatgaactacacaaatatattattgtaccatgtaatcagttgtgatgaaaggatcattaacagcaacaagctccacgtcgtctct

SEQ ID NO: 5481 - DNA, 812 bp, Glycine max
agagccgcacatacagttggtgaaaataaccaagtggaggtaggaaaaaacgagacagatgttgctcagagaaacagagaaatgcagctttgtgatgggtgcaaaatattaggacctacctggttttagaacatgttctgtttttatttcttattttaacaaataattacaaaaaataacaccttgtttttattgttgaccgtttacaaaattttctacatttccattgtttcccatacaaatctttgaaaataaaataaaaaaaataaagtgaaaacaagatggcacttcataattatttgtgcaagaaaaaaacaaaaacagaaaataatattctcaaacaaaacagatcctatatatccagtaatgtaaagcaataattacttaaggagatctagtatatggtaataagttggaatgaagaatttcaaggaaatgagaaagaaagcctttcaaatatctttcttatacacattcatggaaactagtgccaaccaagtagatttaccatgtcacccaagattcctcaacaaaaagaagaatctacagctaatttttgtcacaatggacaaaatctacaagaattaaatgtaagcaccataataatacaaaaatctttgaagagagtaatttcattaacaaaccttgttctttatatcttttgcagaatcggtcacatatattgcagaattgggatcactggcagacatttttcctgtttctccctgcaagaatttatattttaaagatgtgagataacagctacaaaggaatttggaccttattcagagaaaatttcaaagtctatatgt

SEQ ID NO: 5482 - DNA, 681 bp, Glycine max
atatgctggatattcatcatgctttcgtaaagaagctggatctcatggtcgagacactctaggaatattccgagttcaccaatttgagaaagtggagcaattttgcctcactagtccaaatgacaatgattcatgggacatgcatgaggaaatgctgaagaactctgaagatttctacaaagcggtatgatacagccactcattaaaattttcatttccatttttaaaaatgggaccttgcctcctgtaaaaatatcttaatctgcattgaaatttctaatatcttactttttccatgagtttagtctttcattgaaattttagtaggcagacaagtaaatttatattttgagaataatcacagtgcccctcattaagcgactaatgtttaaggccactttgtggatgtgttcaaatttcaaataaatattatacaatttagaaacagttactgaatcccagggtactattaattgttggggataatcatgtgttctttgacatgccgaacatatctaaccatggggaagtatagtgcatccctttatttctttctaaattttttatatctacaacttcattgtacttgtgatgattgtttgcactctgtattggccaagtgatgacttaaagttaccacattatatttttgtggatgccattgtgtgtagattatgcata

SEQ ID NO: 5483 - DNA, 710 bp, Glycine max
aaataaaatttaatcacatgagaaacaaaaaacatggggagagaaagaagtcaatttaagtcagaccaaccaatacatcaatctacacacaatggcatccacaaaaatataatgtggtaactttaagtcatcacttggccaatacagagtgcaaacaatcatcacaagtacaatgaagttgtagatataaaaaatttagaaagaaataaagggatgcactatacttccccatggttagatatgttcggcatgtcaaagaacacatgattatccccaacaattaatagtaccctgggattcagtaactgtttctaaattgtataatatttatttgaaatttgaacacatccacaaagtggccttaaacattagtcgcttaatgaggggcactgtgattattctcaaaatataaatttacttgtctgcctactaaaatttcaatgaaagactaaactcatggaaaaagtaagatattagaaatttcaatgcagattaagatatttttacaggaggcaaggtcccatttttaaaaatggaaatgaaaattttaatgagtggctgtatcataccgctttgtagaaatcttcagagttcttcagcatttcctcatgcatgtcccatgaatcattgtcatttggactagtgaggcaaaattgctccactttctcaaattggtgaactcggaatattcctagagtgtctcgaccatg

SEQ ID NO: 5484 - DNA, 687 bp, Glycine max
gaggaagcattggctgtgatcaatcggatcaagagtttgggattaactcctaatgtggtgtcctggactgctatgatatcaggctgttgtcaaaatgagaactacacggatgccctacagtttttcagccaaatgcaagaagaaaatgtaaaacctaactctactaccatttccacccttcttcgggcatgtgctggcccatcactgttaaagaaaggtgaggagatacactgcttcagtatgaaacatgggtttgtggatgacatatatatagccacagccctcattgacatgtatagtaagggaggaaaacttaaagtagctcatgaggttttcaggaatattaaggagaaaacactaccatgttggaattgcatgatgatgggatatgctatttatggccatggggaagaggtatttactctatttgacaacatgtgcaaaactggtatcagacctgatgctataaccttcacagctcttctatctggttgcaagaattcaggtttagttatggatgggtggaagtactttgacagcatgaagacagattacagtattaatccaacaattgagcactactcttgcatggtagatcttcttggaaaagctggttttcttgatgaagctttggatttcatccatgccatgccacaaaaggcagatgctagtatttggggtgctgtt

SEQ ID NO: 5485 - DNA, 728 bp, Glycine max
attttgtggttgcttgcaactatgtttaaagcttgcttgtgctcggaaagcaacttgtagttgctggctaatgatgtctagctttgtcataatttgctgtatgttttgcccaatgagggggctttatagctttcctatttaaaaacttattttatcagttcatagtgtgcaaaactgaattataaacttgaaatacatcaaagcagttttgttactctcttcttcttcatatatgtttatgttttctggtttatacttcactacttttatgcttctgcatagtctgattgcatagtctgattagatcgttgctccgtctgatagctatttccgcttcagtctgatagttgttttcttcaatctgatgctctgtctgatttattatctgttctgttttttgcttcagtctgatcagttttacagcatagtttgttacccttttatgcttcagtcttatacccattttttcctttgccatattccaaccgtatcatctattaattttggaggctttacattatcttagaggtggctatggtctgtgatatgtttgaagacattactattttcttatagtgcctgtgttcctagacattcagggtttacgctgttgctccttgattattgatcatgctgtcttgttgttccaggtgagtgtacgagttagagacttggcagaacataaggttatgagtattgagaagctacttgaacatttcagagacaaa

SEQ ID NO: 5486 - DNA, 801 bp, Glycine max
agagttgaaattacttgtttaactaatttttgtgttttgtgaggggaattgtggaggatgattaggatggccacttgactttttcttattatttttatttgtttatttactgagtaaatcacaattttaaaaattgaacccatcattattttatgatcaagagacgggagtaatggatcattgatcaaaacaaatataagtaaaatatatgtatatgtattgattgtattataagtttaataattaatcataaaagtttgatgataaattaatccattaaatatattttaggtttttacacctaatatattttttcatacacatacacccaataatgagagggaaaaatcaaaaatactcttatgtatgactcatatgaattacgaattcatcatgcattattagattaaaattaattgttacaaaatttattatgtaaatttatatgtatatgtgtattaaatatatattaaacattttagtgttatatataattacattaattatttttaacataattaatctaattcagtttgttagagtgtcgtgttaataaggacaatattttcaaaccttagcttactaatcccttagcttgatacaaataaaaacacttatcaaaagaatacaacttaaatcataattgactccacaaaccatgtgattaacaaatatgacttgaaacgcaatactgaagaatacaggcaccccttgcacatgagacttgagagacagcgcatcgagcatgtaggcaaacagagtgatgcacagcccagaataaatgaaactttaaaagagtag

SEQ ID NO: 5487 - DNA, 650 bp, Glycine max
actctttcacagtaacatttcttctgggctgtgcatcactctgtttgtctacatgctcgttgtgctgtctctcaagtctcatgtgcaaggggtgcctgtattcttcagtattgcgtttcaagtcatatttgttaatcacatggtttgtggagtcaattatgatttaagttgtattcttttgataagtgtttttatttgtatcaagctaagggattagtaagctaaggtttgaaaatattgtccttattaacacgacgctctaacaaactgaattagattaattatgttaaaaataattaatgtaattatatataacactaaaatgtttaatatatatttaatacacatatacatataaatttacataataaattttgtaacaattaattttaatctaataatgcatgatgaattcgtaattcatatgagtcatacataagagtatttttgatttttccctcttattattgggtgtatgtgtatgaaaaaatatattagatgtaaaaacctaaaatatatttaatggattaatttatcatcaaacttttatgattaattattaaacttataatacaatcaatacatatacatatattttacttatatttgttttgatcaatgatccattactcccgtctcttgatcatata

SEQ ID NO: 5488 - DNA, 824 bp, Glycine max
gaacactttaaaaaagaatagcatcaatgtgagacaaccagtttctatgaacaccttgtttccgcttgcaaaattgcatggtcctatcagtccagagctcatggaaatgtgggagatgcgacatcatgtccatgaacgacaaagggattctctagctctaatatatgagaaggtactttttcatggtttctctgtttgtctatttaccaatatatgaattttgattatatacaaaatgtgatatgtaaattgcagctgaggcaatctcttgttaatgaggggaataaaactggtggcacattttttaactctgaagctgacaatgatgacaacgaatatgatggtggaaatcctgattttgatacgccagacaatgcttacatggaagaagatctacctcctttcagtaatgaggttaggagaggagaccagtaatatgactatatacttattctaaatgacaaatttgaaacttatattatatctacatgaattaacagcatgaatttgatgatgctcatatcaaccctgatgaagctgtagatctttctcaggctagtttggaagatctttgccgctctcacctggtaggagtgctattgtctttgacttttttgggtataaaagtagttatttatcatttccaaaaatctgttgaaaaggcttctatcaatccccctaccccaattcataatttatttgactaaaccctgagagaaatttaagtcctgtaaagcacaatagtatatatatcatcccattgtttccacacaatagttttgaaggaacactacagtccagagttgtagacctatatgataaat

SEQ ID NO: 5489 - DNA, 731 bp, Glycine max
  misc_feature (716)..(716): n is a, c, g, or t
tgtgaccatggcatcagttggggtgattactactagtgataatgtgatgaatagagttgtttatgaggatgagaggtcagatcctgggtttcggaagccccctttgccaatgcagcttgtgcagcctaggactagtggtggcgtgggtttgccttctcctgattcagtagcaaggtgtgtaatttctatcatattttttttatccgtaggaatcaaaaacagtgtgaggaaatctataataactcactcaccctactcatccaattgagctaatccccattgattaatttctgtcatattagtaaattaaccttttttgtttttttttcctttgctattgtcaataatcaatatagtggtttttaaggaaaaaacacaaatttgaaaattttgaatttttgtgatgaattgatgataatgtgttttgaaagtattgttttttggtgaatattttcagtgatagtagtattgcatctgcaaattctttctccaagactgtttactaccaagatcaagtccaagccacactactagacaacaaagttgttgctgctatgccaaatgcaaagagtgaaatatctgatcagatgattcaggtccaaggacaacttcaagattctggctacacattacccccacaattggatcaaaccaagcaacaattccagcagcagcagccattgatccatgccaacaatcactacatccaccacccngcaggcaaggagttg

SEQ ID NO: 5490 - DNA, 797 bp, Glycine max
ggggggggggggttggatgcaattcgtatgcctgcagttttattctgtagtctgtaatgtatggaagatgtatgcatgattagtatttcttggaatccaaggccaaaatggtgctgagattcattgggtgcatgtactttgaagttcctgacataatctgctgaacgatcaatttgctagccttttccgatggatggaatgcatcccaaaacgcaaattcgtcacggtatggacataagttggacgccaccgtgcacagtccaataccattaaagggtccttgaccacaacatgctacttttgacgtaataaatcctgcaccaacaaattcattatgcaatcatttaagtctcctttagttgtcagttatttattgccatctggattataagtttaagaaaataaatattttaaaaagtattcttaagaaaattaattaattaaattaaattgtattatttttaattaataaataaatactttttaaagttattgtttattgaaacttgatatattttagagagagtctagttaaattagacctagttaattgagatttatttatatttaagattaaaaaaataagaaattttttgttgtttatgaagagagtaattcatattcaaactatctaacttagaataaaggcttaaaatgaattaattaccatatgtttgaggattagtgacgaaatcattgtgcatgagttgtgtgttggctgcaacgaagacatctgaaccaacttccttattgagttgtttgatcatctcaacaagttgtgggttgtacaaggaagc

SEQ ID NO: 5491 - DNA, 770 bp, Glycine max
gtatgcctgcagccactccatatacgcacatcagtgcatatataatagagagagtagaagtctagagaacaattgagcattctctgacacccttgaaatttttgtgtagcctaaaccctatgaattgaccactaaatttttttggaaataatgtaaatatggtacatatcatgcccttcatgctgacatgcatgtgcatgcatcatgaggttcaaaaaaaattaacaccaacaaaaattctattgagtcacagataaaacagtagatagaaacaaaagatgtgtggattgtgtcctttgtttttgttattaattgccgcccattcattaggcagttttaggattcagaaacaggtaaagtttcagtcactcttgcaaattgacacttgtatattagctagctgtgtccacttttcatgcaacctgccataacacttgaacatttaaagcacaaggtaaattccagggcgaaatcaagcttaccattcttatgtaagaacaaagatccactgagaaaaaaaatcaagagaaacccttttgatcatatataaactagaattgatttaaatcatgtaataatatatgagcacacacttaaaaattggtaaataatatatatgtaagagtatatatacctggaaaaaagggttccacaaccacatctatattctctagtaccacaggttttagagtgagctttccaatctgactgaacagcatagatctttgagcacttttcacatttccacttcttctccccatgttttctgc

SEQ ID NO: 5492 - DNA, 784 bp, Glycine max
acctgaaacagaaccccggattgaacacataattaacatcaatcctaaagacattgaacctgcatggcatgatgtgtgctgcatttacaaggttcctcctaatctaaaaaatttgaaggttgaagcctatgcaccacttttgatctcaataggcccttttcaccacaacaaaccagaactagagccaatgcacaaacagaagcaaaggtattttctttccttctgggaacgtgtcacaaacaaaaaggctttggccaaatacaaagccttcctcaatgaaaacatcgaagcaacgatacgccaaaggtattcagagccgattactagcttcagcaatgatcagtttgtggaaatgatcctcttagactcggtcttcattttggagctgtttttgagaaaatcagaaaaatctaagcaagaaaaggattacatgttcaccacaccatggatttgcaagggtatacaaagagacctcttgctacttgaaaatcaacttccaatttttgtcttggatgagttacatagaagggtttgtaagcaaaatggtgttagctttcttgagcttgcatttaactactttgaagattattatccttatccacacaaatcaacaacaacaagtgattatgatcaaactaaagagatggtcaagaagaacttcaaatcttgcaaccacttcactgatttgataaggcttttctacctcccagaaagggttcatgtcaaggagtggatgccatcaaaacatttcaccccttgtggtaaaaatgaatgtgtacttaag

SEQ ID NO: 5493 - DNA, 721 bp, Glycine max
agtgcctgcacattaaattttcagtaatcaatatatctataaaagattccactgacatgggtagtgtgctttaatatggaagataaagcagtatgatcatacctgtccaatcatctgccccccaaacacctttccaaatcttggagcatctggaagggtaattccttggaagatatctaccttccaaagagaataaaaaaatgctttaatttaaggctgaattccagggtattactacataccatcaaagatacaccatatgtgtcaatggaaataccaaaattttactatcaaagagaaccaggacaaccacatcagtctagttttacttacccttttctgatatagcaatcatacatctatgatctatcttaaaaaatatttaaattgctgtatcatctttcctttttccaattttcttttaatttcttatcttcaccataggcatgttagcatgtcttttccgagagtcatgcacaaacaagttgtgaaaagatttatgaaggacagaattagtatagtgatgtacacaggcagtaaaacatacaattatttttctctcccagttaatcactccataaatgccttaaatcaataatcaaattaatgatatatattgagagaacctcgagcggctccaaatgcaatatattctccacaggtgagcatgtctcgagagaattttctgctctccagatagactttggctgcaggcatgaca

SEQ ID NO: 5494 - DNA, 742 bp, Glycine max
agcatcttatattcaataattattttgatcttatcagaatcaagtgatgacaatggatttttgtttttgatgtagggctacttggacccagagtattatatgactcaacagttgactgagaaaagtgatgtttatagctttggagtgctattgttggagctgataactgcaagaaggccaatagagcgagggaaatatattgtgaaagtggtaaagggtgctatcgacaagacaaaaggcttctatggtcttgaggaaattcttgatccaaccattgatctggggacagcactgagcggttttgagaagtttgtggacattgcaatgcagtgtgttgaagagtcaagttttgacaggcctacaatgaattatgtggttaaagaaattgaaaacatgttgcagttggctggttcaagcccaattttttcagcatcagcatcagtatctacttcatctagttataataatgcaaccaaaatttccctgcatccttacaacaatgaatactttgattcaagtgtggtacttccacgagcataaattgagtctgtgttggagaaattattacatggttcagtatagtgtggttttgactaatctctatgtatcatgtaaactatgtagaagagattatatagttaggatcacatgatcacaaaccatgtaataatttctcactgtgtaggccttttcattttacacctcaaatgtaacttgtgcaaataatgtacaaaacaagaga

SEQ ID NO: 5495 - DNA, 833 bp, Glycine max
aatatatagccaatatatatggatcatattgttacatacacataaaaattaaataaaatcacatattcacatatctattgatatcctatggaaaatgaatgattcgttgtttggtgatatgtaggccataacattgagaaaatacccagcagagatgtctctggccacttgggtttgctttgtaggagcacttcaaagctctattgttgcaatcttcgcagaacgccaccaccctcatgcttggtcccttggttgggatacacgtctctttgctcctgcttacgcggtaagtgcttttggattggatatataagattgtacagtaataagtacctaacccaactatttgagctgaaaaatgaaaaacataacgaccccaccctagctctaatattgtattgcaccctatggtccttattattattattatttttttttttaatttatccttaattatcttattttttattacagggaatagttacgtctggagttcagtattacatacaaggcatggtctcaaaaattatgggcccagttattgtgactgcttttaatcccctgcgtatgatcattgttacggccttggcctgcatcatcttatctgaacaactcttccttggaaggtactacaaattaattaagtagcaaaatacacttcaattctcatcttgaattgtccacatttttttttctcattactgacctcatttcccctatttttgtgctgcatttgaatgatatcagtattattggagcaatagttgtggttcttgggctttatctagttgtgtggggaaaagctaaagaacgtagaggtctgatgacaccgt

SEQ ID NO: 5496 - DNA, 679 bp, Glycine max
actcactatgtttttatctctttctgttccatgtataaaaataagaagacagttgcaaagaagaaattgaactaaatattttaagaacatgcaacccttaaggaaactaagacaaataagaagcatgtgcaaaatacagaaattagtatgtgacatcagcacagatttattcaaagaaaattaggcatgcaactgaatttgtaatgtttgaggagagacattttaagtgaagtgtacttagggaagatataggcacttaatagaatatataaaacaatacttaacaaactatttctattgatctattcattaatgtaaattgttaacatgagttttcaattgaaagtcaatatcggtaaggccaattgaatgcctcacctctaaatcattttctaagctaaaaattttcattgtcaacacagatttataatatttcaaacagataactacataaaagtaaaacaatataattgaaaataatacctgagtattaggtctgcgtcctgtagcaaacataatatgagagaaaccatccactgtacctttgttggtctttaaagagaatgagccatcagctgactttgtgatagcttggggagactcctcggtatggaattcaatacctcttacagacatttgttctgaaacaaaatctctaatctgcaggcatgcgagcttg

SEQ ID NO: 5497 - DNA, 714 bp, Glycine max
attagagattttgttgaagaacaaatgtctgtaagaggtattgaattccataccgaggagtctcctcaagctatcacgaagtcagcggatggctcattctctttaaagaccaacaaaggtacagtggacggtttctcacatattatgtttgctacaggacgcagacctaatactcaggtattattttcaattatattgttcaacttttctgtagttacctgtttgaaatctaaatctgtgttgataatgaaattttttagcttagaaaatgatttagaggcgaggcattcaattgcccttacaaatattgactttcaattgaaaaatcatgttaacattttacattattaaataggttaataggaatagttttttatttattgtcgtatttattctaataagtgccaatatcttccgtaagctcactttcacttaaaatgtctctcctcaaacattataaatcagttgcatgcttaattttctttgaataattctgtgttgattccacatgctaatttctgtatttataaaaggttggaaacttttgaactctggtgaattttgcacatgcttcttatttggtgcagtttcctaaagggttgcgtattcataaaatatttagttaaatttctcctttgcaaccgtcttcttatttttatacatagaacagaaagagataaaaacatagtgaatatatttatgaactgcaatttc

SEQ ID NO: 5498 - DNA, 703 bp, Glycine max
atcatgaaattcaagttccaaagcaaaaagatagatgtatagcaaaataaaataaacttcaaatatattatgagcacaaaatacaggacatgaagttgggttcttatcattgattaataattaaatttaaaaatgtaataacattcaaatttaagaatgtattgtaattaaaagggcctgcctgaacttacaggcatccagagtcaatgaggcatgagccattactgtgcaaacaaggtattatctgggcatttgagaagccaaaaatatcgtcaatgagatgctttgaataagccaaatttggctttaaggaatataaaatatctgaagataatttgtgaaggaaaagtataatactttaatttagaagaggaagcaacgcaacattataacactaggcaaaaaaatgtctcaggaacttgaagggcaagtgattatgaaaaaattcataaaacaattcacgtttggagcctgtaaacataggggcaattccatataaagtatcagtgaaccaaaaaatcctatttcaagaagggacatgtacaacatgcaggttcaaaattcattggtggatacgtttcttcggaaaaactgcatgagaagactccaggttatagaaaatagattgccttttgatgtcagtcctcttaggaacagctggaagagattgcaggattaaacagcaagaacattgccacggcat

SEQ ID NO: 5499 - DNA, 810 bp, Glycine max
tatttatagacaatcgcatctatattagcttgtaagatccttatcttgttcaaagacagtataattttctttcaccataagcattggaacgcagttatgaaatttgtcatttaattgtaaaagtttattttatattaaaatattctaagatacttgacgcagtactgtaataagtttatatctcttttttgtgtgcttatgaaccaaaaataagcatgctttatgtcttgattacatgtggcagaattccagtttccattagcaaaactttatattataatatttcttaatatatgtgagaagatgagaacaaataataataatcatgaggttaaatctaataaacaggattataacccaattaaaataaggcatgtggcaggtattttacgttctccttctcttcgtctatcgctgggtttttttttttttttggatcagcacatggtctattgttgtaactcagtcctacgggaaaagcaaacgaaaccttcaaaacccccttagatttagtttcgctccttgcttccttctctcacgtgaccgagactctagcttctccttcaatcgatcgcactctggttctctccctctgtggcacctttttccatctaattcgtgaagacaatttgctcaaatgcacgtgatggtgtaattcttccccttgcacgtgatggaacagttttcaatccttatccttaatcacatgatttaactccggcactgcattcttagagtcaatttcttcaatagaaaggcatatcccttcttctcgatctcccttaattgatcaaatattacctatacatt

SEQ ID NO: 5500 - DNA, 758 bp, Glycine max
aatatctcatatattttattattctaccacgtttgacatttttcattaggtatactaactgaattaatgaatgatttttttttttttttatcatatgctttccaaatatttaattatacctcttatctctgacatactttcattcgcttcacatattcttatacgataggtatttgatactgatattagtggttacttcactgatatgtatctataaagtatccgagtctttaaaaaggttatgaaaattctaatacgactaaatatgagatgatatagaagtatgtgtaaaatagaaacataaaagcattattgttccttgatgaaccaaaaagagaaactgtccaagaagtgatttataatgtcaatgacttcaaaagctttattttgcttttagtaatgtccaagaagtatgacttaatttgtatttgtaaaattacaattatatagttattatgttttatgaacttttagacatatctaaatataaccttaaatgagtgattgtatcctgtatattttttagaataatcctatgtatgtatagtgactgatacacctattatatctatgcattatagcctttttattttattcatgatttgtttttcacttttttcaaattcaggtctttaccctcagattttgctaaaaaccccagtagatggagaagaaccttgaaaggtgttagagagcgtcatgggagggagagaaagggctggatgataataatccacgatctctctggctcaccggtt

SEQ ID NO: 5501 - DNA, 710 bp, Glycine max
gtgataatttttcttataattttgatttcctcttttagcactcgcatttactgagaaccaaaccctgtactgatggcagaaggacctctttccctccacaaatgtcctagtcaatttagtagggaaattctttacttttaaattgttgctgtcgttatgtggttacactcttgcctatcagtttggtgtacctgtcctgctttcagaaaatccttgaattgcttgacaatgcattttttgaatcttagcaacacttctgttacataaaattaaacgatttttactgcttggcactaggatgttctgcacatccacctgctatactcatgtggcacgcatgactccttcttcctgttatttttgtattttgttttgagttggatttggactttttttgcaccctagatataaataaactctcttatgggttaggaaaaggtcctaaaactcttttttaatgtagtggcttaggtttgaggattgtgactttctcatacaattcgttttggttttgatttctttatttatgttgttttggggtactaacatgcctatgttagcagcacaatcagataataacttggagcaatcagatccaccatagcatggattgcactcacaaacaggttcatggccttttagaataagaccatctaagtagactcttccatgtcctgagcatggtatggctgccacagcctctgcttctt

SEQ ID NO: 5502 - DNA, 695 bp, Glycine max
tcttacctttggagatgatgtgcaacatggcagaaattcaaatcacactaatgtaagcaaaaggtttgatggtgataatcatgtcaaacaagatacttttcattgggatggacacatggaagaagcaaatagaaggtccggctaccataataactaccacctggatcatgagactgcatcaatggcagcacttttctcaaggacgagccgttgtcccaatgcaattaattgcacgcgtccctgctgccatactatattggccactaattcaattggctggagcagcaacagatgatattgcattgggtgttgctgttggaagtaaaggaagaggaaacctgcctggtgctacatctgatattcgggccacacttcttctactacttattggtaaatgcacagcagatcctgttgctttccaggaggttggtcaggaacaattttttaggtgactccaaactttgctctttgtgaattagttggctttcttacttatgcacctttatacattgacatataaagcatgaatgttcttgcatcttgcagggaacttttggatgacacagattcaagagtggcatattattcttctgcttttcttctgaaggcatggattttaattgacttttggtgttaaaaatgtgttagatccatatatatgaccttttgtaataacttctcattggtgcaggcat

SEQ ID NO: 5503 - DNA, 795 bp, Glycine max
atctcactttcttagatctcagttataataacttacaaggagagattccaaaatgcattggttaacttggtcaattgacagagttgaaacttgcattgaatgaacttgttggtctcgttcctcatactctagcaaacctttccaatttgcaaactcttgacctcctggataattataatttgtttgcaaatgaccttgaatggctttctcacctttctaatttgagataccttgatctctcaaatgtcagtcttagtagagttgttgattggccatcatcaataagtaaaatcccttctcttatggagctttatttagatcactgtatgctacctcaagtcaatcctaaatctattacccacctgagttcttccacttctctccaaatcctcagtcttcaggaaaatgaattaaactcttcaattctgtcatgggtacttaatgttagcaaagtcctcaaatctctagatctcgcaagtaataaccttcccatacaatcctcgcagattctgtgtcaactaaaggatttagagttgttgggtctcgaccagaactctttcagtgggccatttcctgatttttttaggctttcttccttgaagagtttgacacttcagaacaacagtatttctgggccattatcatttggtcacttgccccatcttgagtttttggaccttagtttcaaccatttgaatggatcattgcttatatttgaggtcactcaattttcctcattaaagtatttggatctgtcccataatcaattgagtattgtcatgctctgaaaattct

SEQ ID NO: 5504 - DNA, 687 bp, Glycine max
actcacagtttaaatactgatcctaaaactgatagtgacacaactcgtgttcattctaacagggcaaactgggatctgaatactacaatggatgcgtgggaagaatctgggaccgaagctggctcggttaaaacaagtattgatgggctgaaaatttctgatagttcacttgatgaaaagcagttagtgtgctctccagggatgacatcgccagcaagtgttgtgtctgtaaagccaatgtgtgaagagagtcagaaaaaaactttcacttttccatctggactctgtggaccgcagtttaaatttgttgactcaagtaatctatctcttgcaccatttattcagaaatataccgaggagccctctagattatctgttaagctgaattctggtagtgctattcccaatgtgagcttgtcaagtgtggcttcaaccgtggatgatgcgaatacttctagttttaggttggtaaaaccagaaccatttgatgagaactcaaaaagggatttgaaggatgttaatgcctctactgtgggttccttagatagtgttactgttaaacaagaacttgttcaggcttccgctgccaactcttcaaagttgtcaaatgttagcaatctattgaaagttgatgctgcctccgttaaacaggaaccagatcacaagggtaatcaggaaggatccaat

SEQ ID NO: 5505 - DNA, 743 bp, Glycine max
tagctcaaacttttcccatgataagtttatgtcattgaccatgttgtcacagataaaaggaaaactccgctacttaaaggtataaagaaataacccttcgaaatctgtatatattgaaattgttttctctttatatatatttgttaaatttctaaataatcaaattcaaaattggtcaccattgaacaattactgatggctgttaagtttgctgacgttgatgggggacggggattggattgtaactgaaatcttcaataactgaatatatacactaataattgagaggtataaaatcactcatgggcctctatataactattttaggagaggtagaggttttatgacgaagtggttagtttaatccttattgtcctcattcttcgtaattaatttaaaaatttcagcactgggtgggcttgttttttgtccatgtttcagtttcgtagggctcttgcattaggggatgtgtaacatgttggagatataaaaccatttgagaattgattcttgacagtaattcatgtggcttgttctgcattaataattcctgtggccaagctttagcttcaatttttttgaggggagggggagggggatatcatccaatttcatatattattttgagtaaaattggctagatcggaagaattaattgtttaggttttttcaaggtattttctttttcattttattgttttgggaagcaaagcaaaaaatacctagtttaagttcatgatcca

SEQ ID NO: 5506 - DNA, 877 bp, Glycine max
tcacaaatgctcccttcattctcaatcttgattgtgatcattatgttaacaacagcaaggccgttcgggaagcaatgtgttttctcatggatccagaagttggtagagatgtgtgttatgtgcagttcccccagagatttgacggtattgatcgcagtgatcgatatgccaatcgcaacacagttttctttgatgtaagttaacatcgattcaatgattttatcgagagtcaacagaaaaatggcgtatccttatgtgcaatgatttcaccaaatacacactgcatttgcatgcatgtaatgcagaaactgttaaccaccctgaattaaaaatcgtggacacaactctgtaatttccaaccctcatccctgtttgatggactgtaatttgatggacttcaattgttcatttcaggttaacatgaaaggacttgatggcattcaaggaccagtatatgtgggaactggatgtgttttcaatagacaagcactttatggctatagccctccttctatgcccagcgtaccaagatcttcatgctgttgcttcccctcaaagaagtccaccaacgatgtctcagactttcaaagaaacgcaaagagggaagaacttgaggccgccatttttaatctcaaggaacttgacagtaagctcagttacttttttcaatcagttctagagaagcatatagcagaatcttcatgcaatattcttctggtttcttttcttcttgcagattacgatgagcatgagaggtcaatgcttatttcacaaatgagctttgaaaaaacttttggcttgtctactgttttcattgaatcaacactaatggagaatggaggagtgcctgctcggcaggcagcggcaagcatggtgg

SEQ ID NO: 5507 - DNA, 700 bp, Glycine max
ttcaggcactcctccattctccattagtgtagattcaatgaaaacagtagacaagccaaaagttttttcaaagctcatttgtgaaataagcattgacctctcatgctcatcgtaatctgcaagaagaaaagaaaccagaagaatattgcatagaagattctgctatatgcttctctagaactgattgaaaaaagtaactgagcttactgtcaagttccttgagattaaaaatggcggcctcaagttcttccctctttgcattcctttgaaagtctgagacatcattggtggacttctttgaggggaagcaacagcatgaagatcttggtaagctgggcatagaaggagggctatagccataaagtgcttgtctattgaaaacacatccagtccccacatatactggtccttgaatgccatcaagtcctttcatgttaacctgaaatgaacaattgaagtccatcaaattacagttcatcaaacagggatgagggttggaaattacagagtgtgtccacaatttctacttcaagggtgttaacagttactgcattgcatgcatgcaaatgcagggtgtatttggtgaaatcattgcacataaagagatgcccgttttctggtgactctaaataaaatcattgaatcgatggtaacttacatcaaagaaaactgtgttgcgaatggcttattgatcactggg

SEQ ID NO: 5508 - DNA, 727 bp, Glycine max
acttttaacgtcagaggtcactggtttcttaatgacagaaatcctcactaaagaattaagctttccaccactgcgtgaattttctgcaaataaccaacatatggcataatgtgttacattcccaagttgatagtattattaaacatctcttggaagaaaaatatcagatacataaataaatcaaactatagccaactacacatgaatcaaaatgaaataatgctaatgtggatggtgtgcagctatcaacccccaccccctttctgcaaatcatactagtgttatgaaaaaggctacacaaatattaggcaaacaaagatcagattagtgcagagctcaaatcaatatatcattacagagcgatcgaatcagattttctttttaataggagggggtgcatgggggctgtgttccttgactaataccacccggagagagcgagatcacaaatgtaaggtaaaagcagattagttgatataatacacaattgaagatggtccatcaaattgatctgctctcatgttaatcctctttcaatagaaatgacttcactgagcagtaacattacttaaaattcagtgtacatgatgcattggtgaagtttgatgtatctatctagttgataaacacatttaaaaagtgcacataccttgtttgccagaatcatccaaactggcttttgtcagagtgtcagttggtttgcttggacaatcttctgaaatctttt

SEQ ID NO: 5509 - DNA, 770 bp, Glycine max
aaggatggactgcacggacgccaaattactgatactctgcgggtattgaaatctatccttgtgttattattgttgctttgtcgttatagcttccaagcgtggtatttagttagaaggagtgctttaaagcactgtatttctcaaaagaaatgctctctgaaaaattggaaacttgtaatacttaagtattactttatgcttaggaatacaacgacatatcatgtcacggtaatgtcgaagttcaaagcttgaattgccaagtggatgattattagggagatggatctacgttaataaaaacggaagtgaatagtttctatttaattgtaatagatcgtgtttttcttgatgcataatttcttgttgcattacataggagaagtacaagaacaagccttggctcttggaggacgaaacgggtcagtcccagttccagggtcatctagaaggttcacaatcggctacatattacctgctaatgaaggaaaggaaggagtttgttgccattcctgctggttcttggtatgcttgttgtgttaaggattgtgtttgactgtgagaagaatgctcctatgaaatttgcttgtttttcttttctttggtaatgtcctattttttattaccggttgaaaaacagtaagcagatgtgttgtaacttgtatggcatgtttgtctttttaggtacaactttaacaaggtagctcaatataagcaattgacattggaggaagcagaagagaagatgaagaatagaaagaaaactgcaggca

SEQ ID NO: 5510 - DNA, 661 bp, Glycine max
atatcattgtaacgttggtcgcttgtgtgagttcttgcattgccaactctagaaaggaatggattgaaggaaagagatctgggaagcttttggtactctccaaagaagaaagaccaaaatttttggaagcttttgttaaagaaaaccttggtcttgcgaaatgtttctcttagcagcatttgtggttttactgtgaaagggagtgtctttagtcgtctggtttattagttcttcaattttgtccacatttaaatacaagtgtggttggtaacttgtttattaaggtcaccaaaaagacaaaccaatgtgtttcctctggctagcttttaattctacctttttgtctacggcatctcattctcatgctctctgtccctctcagctcgtgactgtgtggtaaattggtaatatgaaaaatatcaggttggatggccaaagtcttttgaagtgctactcctcttggttaaagatatttaaatatatgagattataggtttttgctgttgaaaagttcttttaacagaaaattcagtttgtcagtgagaataattaatggtacaaaggaaccagattttgttaggacccctttttaaaatttagaggaaagaaaggaagggagttaatcacctaaccttggattttctggaccgcaaagaacctc

SEQ ID NO: 5511 - DNA, 696 bp, Glycine max
tgttccggacctaataacgagaaacccaacaaaaaacttaacctcgttgggccaagtttagccatttgcaccaagctcaaaattatcacaagtcatttgtcatggttgtgatctaaagactaaatgttcacccaacggtgtcacatcccatgtttcttttcagaatattcttggcattcttaggatgacgatagagtttgacatgtatcacataattgtacctcacctgcattccaactctattcaaattcaattaaatctaaatttatgtaaaatcgagcttttacctatcaatactctattcaaatacttgggtatgtaaggattttttatttatttataaaaatcaaagataaatattaaaaaatttataacaatttacgtattatatttaattaatttttgaaaccatgagagagagagaaaagtatcacaatcaacaaaaattccacgtaaaaaatgttaatatttatttatttatttatttttgtacatatcttatttccttcctcctacatacaccttttcagctaggtcaattacaaagaaatactttcttagattacccctttatattttttgaatagcctctacaattattacactataatgaaaaaaaaaaaaaaaagcaaactgcaatgtggttatcatatgaaggtatactacagcggtttaagccactgttaaatgactctc

SEQ ID NO: 5512 - DNA, 799 bp, Glycine max
gcattgtatatattgacctgaaacgaactattaactgttgtaacaactaactaactgctctactggttatcttctcacatgacccatacattactgcccccgggatgtcagctctcaggggtggtgctaagataggaatttgggtattatggggagtcccacatcaagtagtatggaatgcttgttggagtacttaagtggcttcattctccccctttaatagctagcttttaagggagggttctccaagtacttgggtgcttatcaattggggtgtctgctcatcttatgcgcgggtgcctaagtcctgcattgagcagtatgggggcctgggagtacttaagtggctttcttcttcccctttaacagttgctaggttttagggagggtttccctatgcttgggtgcttatcagttatcagtgatttgacctattataactgcatattattctcatcagtttacaccttacaccacaaacattgcattgaccatatttgatcatataacgtaatacatattatatttttgtagctgttgactttggtactggtgaagatccttggcctatattcaagttacaaaaggagttcaatgccccaggaaaatcaccacctttgtcagcgtaagtgtactcctatgaaatattatttttgtttatcaaatgttaatactcaaagtgcttgtcatatcagtgaattttacaccgggtggcttacacactggggagagaaaaatgctcagactgatgctgattttacagcagctgctcttgaaaaaattttgcaaaaaaatggtt

SEQ ID NO: 5513 - DNA, 681 bp, Glycine max
ttgaattgaaaaagtaacccctctctgcccatgaatctgttgaggaaaatactttaggtaatgtccagaagaaaacttttcttacacactctgcgtaatgaaatttatatgctccctttttccattgtcataaaaataagttaatatccaaattacctcaaaccccaccatttacttatatataatgactaaaatcacttcaatcatcaaaatataactccaattatttatctcccctctcactttcactacactttttataactctacaaaataaaaaatgtgaccttcagtgcgtgcatgtcatagtcattaacatggtatcaaatatcaataccagcttccattcacacacccaaaaaagtaaacaactataacaaggctacataagaaatgtatctcaaagtaatagggaagaaaaacaagaacacaaagaacaagatgtagaagacattgagggaaaattaaagattccattagttcactgatgacccaatattgaaaatcatatcaccagacaattagagaaaatagccatattcaatatttcctttaaaaacctatcccatgtcaccagacaactatcaactatccatcactatttggacacatggcccaccaatatgaaactagctttccttttttttttatcagcaagaaactacctttctttgattacatt

SEQ ID NO: 5514 - DNA, 678 bp, Glycine max
tgtaagatgctaataacaaaaatatagtctgtcatttcatattaatcataggtaattactatcatcttactggaaaattggtgaaagttgaatttccccaatacttaagtgtagcagattcttcttcatcataagcccctgcaatatttaaaaaataacatcttatcatcatgttatacatgattaaccaaaatcttggttctcataatgaagctactcaccaaggtaaactattaatcaatgccaattccagttcaagttccaaaaggaaaggatgaacatgaaaacatgctagcatgttagcaaggagaagcaagtgaacgagaaaagctaggcaatatattgagaagttgatgccaaagccaaagaggaggaactatataccttgcttccctttcttcttctgtgttatgttccaagagagtttgtcccactagtgagcttcataccgacccgtccatctatgtctgtttacagtctaatttggattagcaaattcaacaaaagacaaaagtagttagtggtctttgaaactatagaacaattggaaattccttcttatatgacctgttaacaccgcgaagtcttgagcttctctttgttgtgctgattgaagaattttcaccaacttcttgctgtggtaactgctggtggtggttatcatcaccgctgcttgct

SEQ ID NO: 5515 - DNA, 844 bp, Glycine max
caccttgtctgcctgcagcctaagaaccttctcattaagttgcaagataggaacatgctttgcttggcggtggtgccaagctcactaagtggaatttccatctttggaaatgttgcacagtttgattttcaagtggtgtacgatctcgaagggaagaaagtttcttttgctcctacggattgcactaaagtttaattaattaattaattaaaatatataaaagaaattaaagaaaatgtttaacttgttgcttcttttcaataataaccgattcattgctaaattcgaaaggggatattttattttctatgatatataggtatgtttgtcctttgaaatgcttgaaacaatgtttgtagcaaataaactttgttagggctgggatttgctgtacgggtaccggttaaaatacttcttgaattcttatggtaaaaatgtcttgtatttattgtacatgattggtacctcaatctgagctatagatatacgatttttttattcggtcaaagaaagatatatttatgtagagtgatgatgatatatatatggacatcaatattttttatacacctaacaaatatcttacctttctttctatctctatatcttaaattatattacctataaaatctatactttttcactgttatctttctccgaaagtgtacatctatattttttcatttatgtaagtgtaggttcaagggtaaaatgagagcaagtaaaatacaaaatcccaagatcccaaaacttgtatacaagacccaagtagatacgttactcgagccatccaatcccacgaaaatagctgctattcagaaagtgatctgtcaccccaagacca

SEQ ID NO: 5516 - DNA, 784 bp, Glycine max
aatttacgccaattgactgaattgagccatataagagacacgtgattacacaatatacttgaattcagctgataatggaaacgtcaattcaagtgaagtgactttttctagtgacttgattatacacaagaagtaaatatattcaggatttagttacatggcataatattattatgttgatattggtctacataattgatatgcttgaatggggtgtttttgaaggggctttttttatattgggtacgggtaaaaatggaacacgatacaacgagatttataatattcacatgacaaatttgatgggagtgtttggaagaacataagaaaacttatttgaatttatgaaaataacttgtaactctcaagagtttttttagtatatttcaataactatattagtgtaatttattaaaataagttttttttagcttatttcaataagttccttagttaaatttatgacataatactactacagcatcgtgatattattatttactaatgcaaggatccaaagccatagaagtgcacaaatagtatagccgtatgactatagctaggtaggttgactagataaaccaattttatgtaattcattcaatgatatgatatatgttctacttttaatttttgtcttactaattaattgatcatggccgttttagatttgatagtagtatatatcttagttaagcacaagaaagtagcaagatagaactacgtattggtatagagatcgagtggaccacgcgttagaacttagagaagagatagtaattta

SEQ ID NO: 5517 - DNA, 738 bp, Glycine max
aagttagattaacttgtaactatctgaatcttcatcaaccaaatcagtattattgtcagcaatgacatttctataacctacatactttatggtgtgtttggtaccaaagaaaatagaatgaaggagtggaaaaggaatgaaaagtagtaaaaatccattctttctacagtttggaacacaccaaaaaaggagatgaaagaatgaaatgagtgggacccatgaaaaaaaaaaagcaatccttcctaaactggacggaaagctagcggatgggtcttcagcagcgtttcaaaactttgtattttgcagcaaattttatatgtagaatatgtaatagaaattttagaaattattttcaaccatatatgaataaaaataaagtaataaataaaaatagttatatactttttttaaaaggcaaattgatttttattgaaaagggcatgaaaaaaagtatatataatatgatttgtagtgtcaatattctaaatttaaataatcaaactataaaaataaaaaagttactaatcaactttttattaattaaaataattatttttattctacactttccttttcttttctttcttaccaaacctaaaaaatcatcttactttccactccttttctttccatctcatttctttccttctacattctttactttcactttcttttccaaaccaaacatactcttacagtaaatttggagctgtaggtcagtctgaggagtggtgtctt

SEQ ID NO: 5518 - DNA, 692 bp, Glycine max
atcgccctgcagtcccagaaggaaaaggtgtatcatcttctgcatctgtggaggttgctagtatgtatgctattgcagctgctcatggtaatcatgctccgtcttaatgttcatttttcgacaactataatcttaaactctttcattgtttttggacattttattatttcttatggagtacaattaatcttctgctagaccaagttgtttcacaaaggagatctctttgaacaactattctttctacactatatcaaaaagagaaacttctcttttttctgatcttgattcttttttgatctttactgaatgcttaaatgggttcaatttttgtccattgattaaattaatttctatctttgtaactcaggattaaatatcagcccaaggcatctggccatactctgccagaaggttggactttatgcagtactctgatcaatactgattttgtatgattgtaattttatctctagtatgcattgtccgcttgatgtattcaatcattttcatcaggtggaaaaccacattgtaggagcaccatgcggtgtcatggaccagatggcttctgcatgtggtgaagccaacaaacttcttgctatgatttgccaggtgtgcatcgttacaagctatcaaaaacaatattttcctgctcttatgacactatgatgctactgctcgttattgatgca

SEQ ID NO: 5519 - DNA, 849 bp, Glycine max
cactcggatactcatgttgacagctggtttcatcagtttagcatttattttatcagtgttgatgatgcattgaagctcaggaatctattaaaatccagataaaacagctagaaatgcctaggaatttttaaacttgcgtttgcttaacaaagcatgtcatgataaaccattttaagtcctcttaaaaaatatcacccttataatcttttctccaaacacagtgcatatcaaatgaagaattggccaagattttggtcaaatcactcaaatggtcgctcatatgaaattagacgtagtcatgttttccaatgttgaaaggataggggtgaaggagaccaccctttgggtttggtaataataaaactcaacgaacgacgatggcgtggttttcgattatcgcccctacaattaattacaaatcaaccagccattttatgctcttcacagaaactattttctaaattctaacatatgcttgcaatatattgtaatgcctttatacaagcctgccgtataaatccaattaacccactaaccgaactggactaaccagtttttttttttcagttcagttttcgttacaaaattaaaaataatttggtaacccaaaaaataattaaaaatttgattaagtttttgtgaaccatgtttctgcatcaacatggttcaaccgaacccatccatgccgattgccgagtcctaattactgtggattttgttgtctctgctgggagaaattggggtgattctgttgtgtgttttgaagtgtcaccatcccaggctgtagattctgagcattttatgccatgctaccaaatgcttgtgaaccatgttgctgctgcaggcaaa

SEQ ID NO: 5520 - DNA, 712 bp, Glycine max
caagaggtgatctgacaagtgacaaacaatggatgattatgtttcatcacgtgttacctcattggtgtggaatacaatgagaaacaaaaaaaagataataatctctaaagcctgcgtgatataagttatgatatgatcatggacacattcatcaaatggtagttgaactattgaagttcataaagaaatagagacatataggtagagacatctaggtataaacatgctaaaataagctgataatacaatagatagggcacttgtgaaattttaaggcattgtgcagtatatgtagttctctagtagtgtatttggttgtaatgaaatgcctgtattttcaagagcatctctttccctttacagtcgtcgtaggataggattatgtcagtgatggtgcttggttaatggctgcttcaagggatcagtcatttgtatgcaaaaatattggaatagtttattacatttttgagccagtttggctcattgggttctttctgttttagacaggatagacgtttctttctgttttaaataggaggattcattattctccttataatctacattattgtcctcttgaaatgatatagcatcctgttaatattgcattcttttgtctaattttaaaagtgttttagtttttgtcacgaagtattttcttcagattttaaacttagtttactttgttgattaatacttttctcctgatctt

SEQ ID NO: 5521 - DNA, 816 bp, Glycine max
caggctcaagcccatggaggagttgtgataaacatggaatcactcaaggtcccagaaatgcaggtacatgttgatgtgggaaactctcctccatacgtggatgtctcaggtggcgaattgtggataaacatattgcatgagactctaaggtacgggttggcgccaagatcgtggacagactacctgcatctgacagttggaggcactctctccaacgctggtgtcagtggccaggcatttaggcatggtccccaaataagtaatgttcagctgctcgagattgttacaggtttgtcaaaactaacaattaatattcactgatataaaaaataaaaaaagtttgtaaaaaccatcttctaaaaaaagaaaatgaataattgtgtaatttactgtgttgtcttttctgaactactaattcatttgatcctggctgcaaataagttttcaaataaagaaaatgtctttttttttttttccctactttgatgagtaagcatggtcaatgaatggatgcaggaacaggggaggtggtgaactgttccgcagagaataatggggatctctttcacagcgttcttggggggcttggccaatttggcattataacccgggcaagaattgtcctggagccagcacctgccatggtaatgaatcagtgactataccaaaacaaagtctttttggttttaggttgtgttatgagagcacacaagtagtcatagctaaaaattttctattttttggaacaggtaaaatggattagagtgctgtactcagatttcacagcattcacaagagaccaagaaaggttaatat

SEQ ID NO: 5522 - DNA, 833 bp, Glycine max
attttcaagagttgatgttccttacaacattagctgttactttgataatgctgtttgcaaaatctattagcgtatactgatttgattctcttgtgaagtataatctatttataaaatagttactttttgctttccttcttttcctattaaaaggggaaaatatttatgtatatttccttttccctcttactgtatcttcaatgacaataataatgactcaaacttagaaatatctgagctccttcctttttaatggcaaatgagattatcagctaattatagtttatccatgttatttaatgtcatttaactgttgggtctatggaatctttagcactcaagataatgggagagtgttagcagtaataggaaaggttcctgttatcaatatataaataaacttgacacgatatatgggggatttatttattttttgttcttatatacattgattacattcgttatgctatgaaacacaaatgctcatttgttcttcagaacaactaaaacttaatgactcttgcattttctgctttagtggcatttaagttatctagaaggaagactgatgataccttcaaattgctccatacaattctctttggaaggagagggaaggtatgtcttacttcattaactatctgtattttttgttactgttgttataccacctccattgacatttgtttttttagtttttgtattatgccacctctatagttcaggatatggggtattggttgcctagattgttaaaaagttaacactcaacttacccagtgttaaaatgtcatgctgatgttattaagctttattgtgctctttttacactt

SEQ ID NO: 5523 - DNA, 727 bp, Glycine max
tctacatgtgggctttacctcagacaggggagccaattcaattaatgttcactggtacacaaggaaacaaaatcttcaccatgtgagtctaattctcagcttcattcactactactctattatctattcactatctactctgctgaccaattttatgccacgcaggtttgggatgttaacataattgagacagcagaagaaagattctatgactccaacatagacgagttcaccaatgccattcaagagaatattacggtattttatgcagtagctttctattatccccaatccatggaattacttcaaagttagagatgcttactccaaattttctgaaacagaaaacatggtccgatcaagtactaggatgggaaacctgcgattctaaggagactgcatgccctgatatgtatgtccctttagttctttatttatgcaaaagtttattccttcatcactgaaatatatgctgttgaaatattggaacctgattcattagttgatttacatatgttgttgaaatataattgtttaacaaacttgggatttttttcagatacgcgtctgaaggagttcaagcagcctgtcaatgggcatataaaggtgctcccgaaggttcagtgctagaaggtaagataaaatgattctgagaagttaaagagtttcagtcacttttcagattttctgacaatatcatgaaataatactctgcaggcatgcaaga

SEQ ID NO: 5524 - DNA, 833 bp, Glycine max
tggatattgatcaggttgagaatctcatcaagttctgtcctacaaaggaagagatggagatgttaaaggtactcctctaaaaaattgtgttaaatgtaatttgtgacttcatttaatatctttggtattttgtgtgaatagtatcttggttgcaattttttaaccatattcttttttacttggttctagcttcaaaatcttgaatcatataattgtatatttgtttgtatacatggagattgccatcttagcttcattcaatgacaaattttaaaaagtaaatgaagcatattttcctatggctttgacattaatttattttgttagaaaagctttctataaacgaaagtgagaaaaaattctaaacagaaaaatgaggaagatgataatattcaatccaactgataaacggttacaactatagtatatatgctagagctaggatagttgtacacagcttttattacaactgtcaactaacccaagattagttgagttaactataaggactaactatactaaactgaaataaaagaaaggagtaattttactctactactctaacatgttaagatttcaaatatgataatttcttcattgtatgatctaaaggatggggagactttctcctttatacagagaaaaccctatcttagcacagaaaaaggaaaatactccaattcctgtccaaaatcacctcctccccctctataatttcactcatctattatggtatgatccttgaattccgtttaccactaagcatgtgacagatgtcccagttgctatagtcttttctagtaacttccaacgaatacccctcttggcattct

SEQ ID NO: 5525 - DNA, 871 bp, Glycine max
agctcgtctgcctgcagccatagattggaggacaaaaggagctgttacttcaatcaaagaccagggtcaatgtgataagatatagaagtcatataagtactttgttatgctccataatcatcatcatttactcctttggtctcattttatgttccttttgaaatatttctatctcagtaatcatgtattaattactctttttcaatagtgctccagtttaatcaatcaacctaaaataatttgcattttaagatcctttagaaagtttcaaatgggcgttgagttgaatgtgccttggaatgtgtgccaacaaaaaaccaaacacacacttgagctatgtcaaaagtccctagagggtcccaaatgtttttttctatttcaaatgtgcctcaatttcattgtactgaaacgaattggattaatgttatgttaaattttgtttggaaaaccagggagctgctgggcattttcaactgtggctgcaactgagggtatccaccaaataactacaggaaaactagtttccctctcagaacaagagctagtggattgtgacacaaaaggtgtagaccaagggtgtgaagggggttacatggaagatgggtttgaattcattatcaaaaacggtggaatcaccagtgaggctaactacccctataaggcagttgatggaaaatgtaacaaagcaacctcaccagtggctcaaattaaggggtatgagaaggttcctcctaatagcgagaagacacttcaaaaagccgtggctaaccaaccagtgtcagtttctattgatgcaaatggtgaaggtttcatgttttactctagtggaatttacaacggagaatgtgggactgagctagaccatggtgtt

SEQ ID NO: 5526 - DNA, 799 bp, Glycine max
agtaaggtcatggaaagaaaactttctagtgatccaaaattgttattggaaaaagataaggaaaattcttccaccagtaaaataatacatttattagaatatttagcttgtaaatttcttccaaaacaagtatggggctactttagaataatacatatctccataaaaaatctcaagactaataatatgctacaaaactttcactatcctcctccagaaacaagatagtatcaccaggaaattgcaaaaggttgtcagaacctacattcacacctttgagccccctatcaactagtcatcacatctttgaccagagaaaatgtaaaggaaaaaagaaaaaacagaaaaaggtccttctcagctaaatcctcttttgttttagaaagaagatttaggatgtagtcattgaaggcaaacttctactatcttttgatttaggaacttgtataaaaaaaatacagaacacaacccaatttcttgcagttaagatactcacaagatcctatacaaacgaattccacgatataatgtatttgtcttgtttatttcagaacttagatgtaaacaggttcaaaaatatcttttatctcaaaatgccattaaaaaataaccctttatttcctcttataataatggctatggcagtctggttctaaagctggaagcagcattcagcaaattggcggcaaatatctatcagtacagaaaaggatttgaagagaatacctcccaataaagtcatatttttgctatctcttgattgtgtcccactattttgccaaccaatacaccagaaatc

SEQ ID NO: 5527 - DNA, 685 bp, Glycine max
aaacttgatatctcaggttgtcaaaacataagtcacgttgggttatcaaagctaacaagcatttctggaggtttagagaaactcatttcagcagatggttctcctgtaattccgcttcccttctctctttctgtatgggtgcattttttttttaacttggtggatgaatatttcaattgtaactaattcttggcatttgattatccaggtcactctttctcttgctgatggtttgaataaactttcaatgttgcaatcaattgtattagatggctgccctgttacttctgaaggattaagggccattggaaatttgtgcatttcacttagggagcttagtctaagcaaatgtttgggagtgacagatgaagcactctcgttccttgtgtcaaaacacaaagatttaaggaagcttgacatcacatgctgtcgcaagataactgatgtttccattgccagcatttctaattcgtgcgcaggtctaacttctctcaaaatggaatcatgtacactagttccaagtgaagcatttgtcttgattggagagaaatgccattatattgaggagcttgacctaacagataatgaaattgatgatgaaggtttgcctctgtctctcttctttgaagacattgactaccacatcagctgctatacttaccttgtctttctgcaggcatgcgag

SEQ ID NO: 5528 - DNA, 790 bp, Glycine max
acataaggccatacttcctgatcaatccatgtggattcccacacactcggctgcaagaaaatgagaacacgaaaccaaccatcacaatcagcaaagctcataaaaaaaattgaactacacaaaagtaaatgtaacaaactatagaaaaattcacccaacacctctaaaccaacctaaaatctaataatccaaaactcttatgtttattcagtagcaacgcaacaacaacatcaaaacacattcccaatgggttggatcagcataccaatacgaactaaaactacgccaaaatgtatagacccagtaaaatcaaaagggtaacatttgatatggtcagcaaaaatccacctacccataagctataaaactatcacttaagttatatggtgcaaccaaacatacttatgtcaaaataaaggcagcaaatacgtaatctaatttaaattaaaaacaaatgcaacaaaaaaaaacctaaaaaaacacttgctatgatgctaatcctcaaatctaaccaacatgattacacaataaaaaacatgggaaatcattaagagcaacgactcaagggaattacatttgggatcaaaagaaaacattaataataaaaagcaaaagacttaacgatggaagtgaaagagtgacataccaagtgcgagaaccaggaccgtagttttttgggtgagaattccaaacgttggagtgtcccattgctacgccgcagaagaggttccgatccaaaatcgcagttgctgaagaatctgtaggagaaccctctttgtactctgcaggc

SEQ ID NO: 5529 - DNA, 720 bp, Glycine max
acgcacatataagaaaggaggaactgaatttattttagaaaaagaaatacatgaaagaccggtacatgggattcgaagtaaggttgttgctagaaaagctccgcacaaggtataaaaaagctactccatggagctccttattttcatcttttagtcttaaaaataagctacttataattttaaggacttttatataaagtgtgtttggcccagcttttacttttaaggagaaaaaaaggcaaaaataagctggggcaaacactaccttagtgttgaatccatatcatttttgtgctagttggaatcaggtccttccttcttaccatttgaaatttgaaaaattatttcagaattattgaaaaagagccaattacataaattttatgaagggctaaaattggatctttgggactgtaaaatcaagttactggttgaaaaaaatccatatcattattttttatgaagattaatctttatgtagttccaatttatttcccattaaccttctgtcttttgaatgcattttttgttattggtttgaggtgcctttttgctaaaatttgccattaaatggtctaggatcttcctaattatgctcagcataccgtgccaattttctgtttgccacaagagtggctatggtgtgaatcatggtgtggtaatgctacaaaatacaaggcaaaaaccattgatctctgcaacaatcccatgacaaaagaa

SEQ ID NO: 5530 - DNA, 814 bp, Glycine max
tataaacatctgttgcaaaactgaacatagtctcagaaattagttgagcggttattttcagaacagataaccgcaacatctccctacttttaacatttgatttctatttccaaaattgtttttaattttcaaaaaataaaaataaaaaaaactgatttgatcagtaaaaattattacgtttcagtattcctattgctccaattacattttattcaccccacccccaaacacaatataaataaaaagttgtttcaaagtagaaattgaacgggaacgttgaaccggctcaggtgattggaagtgagggcctccgtcacactcacagtcagcatcgaagatcggagacgaggcatgagttgtgtgctaactactactcttcaaaccaaacacgcatcgccacaaaaccccatcagcggcgcaatttagcatcaatccgatacgacgccgtgtggagcacgatggagaagatgcagcacgcggaggagcttgtgagggagtttctggtgttccgcggcttcaccaacaccctcgaatcctacgaggccgaattgcgcaccgacatcggaaaaggattcgaggtcgacaagatcctcgacctaatcttctccctctacgtccccaagttccacgccgatagcctcctcgcgctcctcgctttcttcaagcactacctctcttcctcctccgacgcgccgcttgcctccacgctctctaagttggagacttctcttctacgcttctacgtcgtccacgccgtccagtgcaaccgcaacgacaaagtcgtcgacttcttcacgctctacggcgccgaatt

SEQ ID NO: 5531 - DNA, 814 bp, Glycine max; identical to SEQ ID NO: 5530

SEQ ID NO: 5532 - DNA, 703 bp, Glycine max
gctaattaaattaaccatcgttttcttttcttcaaatggatatggtgatttcgtgatgttgattttaattttgttataattaaaaaatttcatacaatatgtaaatattttaaaaagaagggaaaagcccggccattccttcttgacttttcctactccgtttgcgtttggtgtgttcccttaacacctagcatttctccatactcaaattactcattgttttagtggttcgagtgcaaatattcttccttcgttgctctgaattcacttttgaaataaaataatgctgagtgctaacacaattgtacgcgcatcattcttaatttaaataatatttattgtttagagtttaatttgcatgtaatattagtatattttttagacaaatattaacaagtgtacttaacatactaatataattagtataaaaaaaacatttacgaatggattaagttgagtttgacaaaatatcacttaaactcaacctaatccaacttgtacaagtacaattttagaaggattgaataataaatctagtgcatatttaaaaattatgtgaaaattacttttaaggcaaaagtaattttatcaaaatattagaactcttgtttttgctttcattcattaaatttgtattcaaacacgcaccacaataattttaactgcaaattaaacatacactaaatcaaactctattcaacct

SEQ ID NO: 5533 - DNA, 801 bp, Glycine max
actggaactttagcgggaggagaccccttttcgaaaatgagattgctatggcggctgattttctagaggagacagcacagctaacaattcaccaaaatactacagaattcatggatatgaaaggctgacccgagtgggaattttctagcaaaaacagtgtatcagctactgctgacagaaaaaaggggagaaaatgaagattggaccttcgtgaatctttggaagcttaagattccatccaatgcagccgtgttcgcttggaggctcattagagaccgattaccaactaaaatcaacctgagaagtagacaagtgaagttaaatgacccaaggtgccttctatgcaacacctcggaggagaatacagcacatctatttttcaactgcaacaaaaccctccttttatggtgggagtctttgcaatgggtaaacataaggggtgtattcccaaaaaatcctaaggaccattttctataacatgtaagtgggtctcctattggaactaaagcaataagatggaagtgttgatgggtagcgctaacatggatcatttggaagcatcgaaatggagtgatctttgctaaccaaacctttgaaggaagtaaagtgatggaagatgcaatttttctactatggacatggcttaaacttatggagaagggtttcaccctacatttcaatcactggtcctctcatctcacagcagctttttgtaattaggaaaggatggtagctgctgtaatctaagtaattagtgcagggtaaatgtatttctgtttctgcaggcagcaagctgcaaaa

SEQ ID NO: 5534 - DNA, 699 bp, Glycine max
aaaaaaatttaaaacccaaggaattatgctagagcttacctatcaaattcatcaatgcaacacaagcctccatctgctaaaacaagagccccagcttctaacatccattcccctaaagattccacaaattggccttgcatttagtataaccatctacaaggtatgcagatccatacatgttgaattttgtattcaaagttaaatgagatatgtatgattaaattaaagtacacttgaaatgctagattatgactttaacaatcatcaccattattgttctatacaaaatgcaatgagaggaaagtccaaaaaaactgaatgaaaaagacatgtggcataaacaaatagtcctctataggacatgcaccaccaccaacaaataattattaaaaatccaaaataacctagcaattctctcatgttaagggttcaacaacaatgttgaacagggtctaggactacacatgcaactagaacatgattttatcaaatataagagaaatctcaatagtttacagagtacttcaataaaatagctttaatagctagaggtgaattcaaacagaaacaaagatttgacagatacacaaaacgtggatataaataggataggtacaataaagtgtgaatgacagtaaaagaatctgttgctgtgaaaattttagcagtatgaaacttacctccatccttcgctgcagg

SEQ ID NO: 5535 - DNA, 724 bp, Glycine max
agttatgaactaatggaaaatatgctcaaagtttgcatctaccaggatgaagacagaccaatctttcatgagccgttactggatggaatatatgcatctgaaggatggttcatgaaattaatggaggcaaacaaactgtcactggagaccctgggaaggctcacttgttttacatacctttcagttcaagattgttgcaacaaactctctatgtacgtaattcacacagacattccaacttaattgagtacatgaaaaattatgtaaagatgattgctggaaagtatcctttatggaatagaacttctggagcagatcactttgttgttgcgtgccatgattgggtatgattctttatgtttatgcaaattatgattaataaattttcttcccctttcctcagaacctcaatttgcttcatgcaacttatgataaagaatatggtgtgtgtctgtgttcccagctccctcttacttaaattttaatctgtaacataatctcacattcagagaagttctccctcaatgtaaccagtaaaatatttgcattatcaggctgtgacaaatagcaattgctgcatttcatattattagttatggactatagatatagtatttcccacatgacatgcctaatccattataattgaatcattaatttctgttgaagcagtgtcaccagtaattgagtggcagagtatttaacaagcaccatttctcaggct

SEQ ID NO: 5536 - DNA, 840 bp, Glycine max
atctgccatgagagatttactgttctccatgtttttacaaaaagtaccggcatatgaaatttgaaagaaaagagaggatatgacagagagagacttagtttctcatttatactaataaatagtaaatgttgttttcctaaaatacccaaaattaaaaaaaaaatgcttgtgtgcttttcctaagagaaaagatatacactctcctcgcacaagcataccttctgtcatccaaataacacatctctctgattcttttcttcataaggactgttttggagctacttcagcaggcaatgtgcagttactataactatgaaagtccttaaaaacaattattgagtgtagtgtgcggtgtaccaacgagcagtacagatagaatggattcttttgggggttgggggataggagggtaaccacattactgcaaggtcagcagtagcactcaatctgagggttattacttcacaaagagatagataatatacaaaatagctaagcaaacaagagttgactcatgaaaaaaaaacatatgaaaagttagtgagaaattaccagtgcaaactcaacaaatgcaattcgagttgaatgatggtaatccccaagaagcctcaagcgatgaacctagatgaataaataaaaaataatgtaaaattttacaacataatcattaaaccaacaacaaacagtattgaacctagatgagtacaccaaaataatgaaaaatatttcatatgatgcttaaactcaaccagcaatcaacactataatcctagttccattaaaagcttcaaacctctccgcaaatagattcaaagaagtgtttgacatctgcttgagtaa

SEQ ID NO: 5537 - DNA, 733 bp, Glycine max
tgcagcatcttcttgttttgccgttacagatcccatatctggcatcctgaactgttgagcagcctgtgtctgcaactgagagctcaagtcctctattttcgcctcaccaaatatgacataggtctcagaatttggactcttgaagacatcaggtttggagatgaagaaaagaatctaatgcataaaacaattgggttaaaagccatccatcttccagatagatcacagaaaagaacaataatacatataatgactcacattttttgttctcttgattgtgaccctactaacaccggtgacaggttttagtcccagcttcaacattgcttttcgactcttcttctcacttctgctctgctttgaaccctcagcaccacctgcatctcagtccaacagaacgaatttatgaacaagaagatcaacagataacaagccaaataaatagagcatagatatggcagcagaaacagagggcaaagtaacagtacataaacacattattttctctaggtaaaaccctttattccaaaagtatgtgacagtcatttacttgccaatgttgcaacagctataaagtgcctcattttctcatctaaacaattcaaccatataaaaatcataagcacagaaaagtagttgttgaacatagttaagttgttaagttcaacatcaagaaaaataatcacaaaaattataatggtggtataagagctcagtgatcagaagcagtgct

SEQ ID NO: 5538 - DNA, 804 bp, Glycine max
caagcttgcatgcctgcagtaaatatgccatcaatatgagcaagtgagcaacagcctaaaaattgttggaatgtttatggttagagatttaattggtttgcatgattttggtatttctatttattcataatttggagacacggatcatataactttaggatttagatcaagtagagtggttttaaaataaatcaggaattgaatttaattagttgtagatcaaatttagttggggttcttgcactagtaaagttatgattcttatggttttcagtaggagctaatcctgtattttgaatttacttatatagaatttgatcatttcagaatgatctgttaggtttcatttaccaccccttacataccattttttatcttcacatctaaattcttcttcctctttggcgcatatcaacaggacagacaaaataaaatttaacctgccttttttagaagataagttttgagggctattaatagtactctcaacggttatgcttttgacttagttgaacatttgttcattgcttttgattggctcccccagtcttctcaatagcagtatcatcatcaacacaatcattctcctctgccactaccaactagtgctgagactactcctaactctccttcgccaactccatttcctccgactttgtttccacttgatgatctccccattgaacttcataaaaatatatgttccactcaatacatctcattatgttaccttaaccttaacctatcattgtttgtctctttcctattatgctagtcttttgtgtttgatcctgtcatcctgag

SEQ ID NO: 5539 - DNA, 697 bp, Glycine max
agttttcagtcctgctgatgctcagttaacggaggctggtgatcccaagttaattaaggatccaaagcctaaatacagaggaaagtatgtttagagttttaaggtgatggtcttgtccctcaccattacaatagacagcactgtatttttcaatgtccaagcggaaaacgtatttcactctatggaagccaatgtgcccgttttaattcaatctagtgatatttttcagatgttttttttttaatattatttcatagatatgtccttttcttacattttaagcagtgtaaaccccattaggtctcaaatgcagtgtaaacagtcaataaaacatatagttccagcaaagttgagaatcctaataaaaattcaaatttcaacagatttcagaaaaaagaaaaacagatgtctgagctccgaaagagtgttaaaaaggaagtagaaaataatctttttcatgaatcaatggagacttgtatatcagaactagtaatgatatcagaaacagaattctacttgctaatctttctatccggatcgatattagtgtgatagcatattaaacagattggtgtgcactaaatttactctctcaattcacgttggaaaggcaaattgagcactaaatttactctctaaatatatatatatatatatagtaagagggaaaactttgctttcatgagttgccttacct

SEQ ID NO: 5540 - DNA, 809 bp, Glycine max
tgttccccccaaaattcttctcgggcttattttgatacatatttagaggtcatggaagaaagaattaacaaacaacttattgaaaccaagagagaagctgaggcagtaacagacgaagccttcacagagctattaaagtgtgagaagttagaagttgaagccatggaggctattaggaaggtaaaccaaatctagtgattgtaaatcatttaggatttctgaagcctataagcttttggcctttgcccttattgctcttgctaatcatgacatgaggaataagtatttttcttatgtatttaaagttttttgacaaagaattacaaaacaaaatccctctggaaaaatactgggattctgtgcacattgttttgagactaaacattttcaggccaaaattatagaagaagcaacattttgaacatttgcataagttcacactaattgtttaaagcattgtttggaaatttctatgacatcatattatatgatttagctgtatccaggctaactccaaatcaaggagcaatgatagatattgagcctagagtttagttgatttcttaatttcatggcatctctcccaacttaagttatattctatctctcaggtcaatttgtttgaatctgcccatgtgcgtgaagtaaagctcagaaaagaggctgaggatgcactgagagatacagtacaagaacaacaaaagctcttgaatgagagtgaagaaattgctggcgagctacaaatgaccatgagaaatattgccctgctagatagtcgtgctcaagaagcaaaccgtaggcgcgatgaa

SEQ ID NO: 5541 - DNA, 707 bp, Glycine max
aaaagaactcacattgttgtgcacagcagaatgttgtaacacagaccaaccaattgaatgcagtttcctacacaaataaggtcccaacagatcctcaagattgccaaacctgagctatggaacagagtaaagaaaaagagaacatcaccaagacagttaaaggatcataaaaaattaattagtagttcactacacaacatgacatgatagctttttaagaaattaaatttattttcattaaatcttttctttcctcaaatgattatagaaaaattaaaattgatttctgagatgtttactttcttgagtttcttcacataaaaaaaaggatattgtttgttcaagattaatgaaagagtgtctatgtcaacatataggaagaacagcaaaacgacaacaagtcatcaatcacacaatcaagaaattcaacaataggttaaaccatagcaaattgatacaccaaagctagaaacctgggtaaatagtctgataaaattgtgaaaatctcccaatggaaaattataaagcagggcatactaatgctagttcatgcaagatagagttttccaataaatttcacaaaatcctactatccatgtgatatcgaggtacttacagaatctcatctcccacagcaatgattgatgctgtgagcatgctgtttttaagtgaatcctggctagtcaggccattgctctctgcaggca

SEQ ID NO: 5542 - DNA, 732 bp, Glycine max
actaaattttttttatcaaacatttaatacatgtacatactcaaaactcaatttaaaacgagtgattaaactagaataactttatagaagttgatcatactttattatcacaagagtttttgtttattcatgctattgatatttacagtataatattaaaaataattttacgaattataaataagtctcagtcatttaacctttaatattaaagaactatgtgtgaaaaaatatcatatcgtcacatgatgatgataataatttgttggaaggtaaattttctttttttatcgaaaattggaatactgggtcaacaatgtgcagtgcctagagagggtaattcacgtgagggaactatgacggctagcttaggttcttgggaacatagggtaagccacattgccaaaagtgaaaacagagaaagggcctcttggaaaaatactaataaatgcatgtttagaaatttgatgtaaaattatttttgatgtaaaagttattctataaaaaaaatataatttttttatctattaaatttatgttaaaacgcgcatcgtaataatttcatttgtaaaccaaaagtgtggtaagtagtactagtaaagaaaacaaatgaggacaagtaagagaagagaagtatgcagaaattggcacaaatattgcgtgggaacagaacagaacaggttctgtatatgtgacccaactgcgaatagggaaaatgaatcttgtgatctt

SEQ ID NO: 5543 - DNA, 817 bp, Glycine max
gaaggtttctttggggaggagggcttgaccaaaataagatcgcatggattaggtgggacacggtgacttcatccaaggaaaatggaggtctggacatcaaggatatcaccaattttaacatagcattgcttggtaaatggaggtggggtctgatgcaaaacaaaggagaactttgggctagagtagtgcaatctaagtatggtggctgacagggtatgttggcagcagatagaccaggtttagaatcagtttggtggagagacttgaagaaggccctcattcattcccctcagggttagattattaatagtggtatgcggtggaaggtgggctgtggggatcaaactaaattttgggaggataagtgggtatgtggggagatgtctctggcggaaaaattccccagattgtgttcaatttccttacagcagcagagtttcatccaacagatgggaagctacaaagacaacgggtgggagtggaattttatttggagaaggccatgttttgataatgaaattgattcagtaggtgtcttcctcaatgagattcaggatatgacctttccacatcatggacctgatgtgtgggaatggactgctaatcctataggtcattacacaacagacagtgcttacaaggtactgatggaaggagcagcagcaggaactcaggaggactgttttgtcaaattatgaagcataaaggttccaaacaaaatagcaatttttgtttggagacttattagggatagacttccgacaagacacaagttgcagcgaaggcaagtgcaggttgctgacatgtcatgcccatt

SEQ ID NO: 5544 - DNA, 741 bp, Glycine max
aattgaaggtcacattaacatgctcccatattaaataacaatatggtgtttgagtttacccattatattcaaccaagcaatgcataaaatatcataacagcttcattaactacttatagctacctcattagctccaccatgaagtggtccataaagagctccaacagccccggcaatagcagtgtatacatcaacgccactgaaataagaataaggtatagttaagcaatatgagactgttttgtatttgctttatattgcttaattgagtagtattgcaataagatgtctaccttgatgcaaggtgtcgaacagcagatgtagaacaattcatttcatgttctgcatgcaggatgaagataatgtccagcgcacgagttagctgaggattgggtttatatgaccgattgccactgaaagtatgcacagtggagattttatttgtgctaaaactccaaaaaaatgctagcgtgtggcaaccattctatcctctaagattgaattatagctctttttaaaaagtgaaaacaaaatggatttgttatatatgaggacaagattcaaactactattaatctataaagaaaagttaaatataaaaaagcaaggttgtcttattccaaattttcgatcaaacacaaaataccatacatacaaagaatctagcatgtataggaagttctctgtgtaagaaaggaggttggatggaagcacgggtggccttcctgccattctaagata

SEQ ID NO: 5545 - DNA, 735 bp, Glycine max
tttatcttagaatggcaggaaggccacctgtgcttccatccaaccacctttcttacacagagaacttcctatatatgctagattctttgtatgtatggtatttttgtgtttgatcgttaatttgaattaaggcaaccttgcttttttatatttaactttgctttatagattaatggtagtttgagttttttgctcatatataacaaatccatttttgtttttaaaaagaggtataattcaatcttaagtgatagaatggtagccacatactagctgttttttagagttttaacttttaacccaatctccactgtgcatactttcagtggtaatcggtcatataaacccaatcctcggctaactcgtgtgctagacattatcttcatcctgcatgcagaacatgaaatgaattgttctacatctgctgtccgacaccttgcatcaaggtagacatcttacctcaatactacttaagcaatataaagcaaatataaaacagtcatattgctaagctatatatcttattcttatttcagtggcgttgatgtatacactgctattgccggggctgttggagctctatatggaccacttcatggtggagctaatgaggtagctataagtagttaatgaagcagtcatgatcttttatgtattgctaggttgaacatagtgaataaacacaaacactatactgttatttaatatgggaacatgttaatgtgaccatcaatt

SEQ ID NO: 5546 - DNA, 793 bp, Glycine max; identical to SEQ ID NO: 3415

SEQ ID NO: 5547 - DNA, 767 bp, Glycine max
cactgatcgcattcaaggtttataacttattcaagcagcagtaaaaaaaaaaattcaagcaggaaaaaaaaccgaaatgagatggtcttaaaattaaccgatcatttaatgtttctttcaatacaagataagtagtttatgtatgtattcggcaatagagacaagtacaacaaaatagagataaatatagaacattttctttttattgtttaaggtatggtaagaaaagaagaaagaacgaaaaaagtctcaaaaacaataaatactcattaggacactgagctaagtccagctagtcttagcagcaaagtcccaaattagagtctcccaagaacgacatgatgtcaggaaatcatcccagttactatattcgttgagagttgaaaatcacattttgaaaaacaaaagtatagatcatcaatcatatcatatcatatctggctgctattgtcattttgatgtcttcagtagtatgtgccaagcttgtgaacccaacctcaaattgtgaaggtgcaaaatatacaccttgcttcaacattccccggtagaacctagcgaacttggctaagtcactcttcttagcatcggcgaaattgaagacaggtccttctgtaaagaaaaaaccaaacatcccatttatatgcccaccacacatggaatgtcctgcactctttccaacttgaagaatcccttgaacaagttctccagtgactttatctaagtactcataagttcctggttccttaataagcttcagagtctctatt

SEQ ID NO: 5548 - DNA, 798 bp, Glycine max
ccaacaagtaatgcaagtttgatttctttagatttaaaaacatccccgaatttgatagagtttcttcgttggcgctcttggtcagactgagtggttagaaaatcaacttcatcctctaagcgagcaaagtcatagatgttagagagcacatgaacagcttcatttttcctattcttgatgaagagccaccttggggattcggggaggaaaagcatgagaagaaactgaacaatggcggggacggcagagacaccgagcatccatcgccaggtgccggggacacgagtaaaagcaaggttaacgatgtaggaaaggaactggccagcagtgatcatgagaacattagtgctgactagtgatcccctgatttcggatggagatgcttctgcaatgtagacaggagaggtaacagaggcaaccccgacacccataccaacgagaaaacgtcccagaatcagaagataagggtctggtgcagctgccatcccaattgctcccataataaatatcacatctgcaatcagagtcgccttctttcttccataagcatcattcatccatcctcctcctgctgctccaactattgcacctgcaattgccatgctcactattgtttcctgaagtaaattactttgtctaaccccttcaaaatcatctttaatatatagaagggctcctgatatcacacctgtacgtgtacgtacgtcaagttaagaataataatgcacaatttttggaacatattccaggatcggcattacctgtgtcgtagccaaaaagcatgccaccaatgccagc

SEQ ID NO: 5549 - DNA, 728 bp, Glycine max
aaaaactaaaatattcaccttcactagtaacaagtatcaaaataaattaacctctatccgtcttttttctttttcgcaaacatccattttgatcttgtctgagttagaacctctaataataagaataccaaaataaatcccacaatgaacgctaactctttactttcgtaggccagtctgcctataatagttttcaaagatctgtacaaaataacgagtctcccaacctttaactaaaaaaaaaaacaccacttgtagtaaactcggcctcattacatctcatccagcgcacagtgagacaacaaaattggtttcacggagaaaggctatcatcctgcaattgacgaagatctaaaagatcctgcgtcaataaagggcaaaattttaactttattactgaaattacaactcacaatgaaagttattaatagggttccatgttacatgacatcaaccagatacagatgtgatgaaaatatgaatagcatctatcaataaaagcccagcccaatactgaagtggagcattatatttcttaattatcattgtgggcttgtggtgttgaaacatgaaataaaccatacaaatcaaagtagtgaacaaagcatatgaattgacagtgtccaaagaaaagttgaaagagcacattcttaatgatgaaaagcaaaaagaatttgcaaatgacccaacagctgtagattgaacttactgcttgatctcttcatgtt

SEQ ID NO: 5550 - DNA, 723 bp, Glycine max
ttaactgtaacttcgggatttatttgctgaaaaatctaggtcaaaataaatcaaggaacccatgcaaacacagaaagaaagggtcaaaatgacttaagacaatgaagcaaatagaaaattatgataattctcctttagaaaagaacagtagcgaggaacgactttcaaatacaaaaaaagcaaaaggatacataagaatgattccccagcaaaccaaaaaccacctcatcccccgagttaagcacgcagctggcactcctcttgacgagagtcccattcactacgaccgatcctttgctgcccatactttctagcacagccacgacatttccctcgcgctgatcatttccagaaacaacagtaatcatactgcacatacatatcctacaatatttacctcaaacaactataaagaaagaaaaaaaaaaaaaaaacccaaccaagcacacaccttcactcaagtattctcattcacatctcaaacaacaacccagtaaaaaaaacaaaaaatcatagtgccaaggtgtgtgctcggaaagaaaaagacaaaaaaaaaataactcttccattccaagcacaatcacaaactccctgagatttatgtacctgcgtgtgcttgatcttgcacaaatttgcacttatagtctgatccttcaacgaaaaattgcaactcctacttgagccaatagtaaagctgggtgtggaaattaaaacattcggatt

SEQ ID NO: 5551 - DNA, 690 bp, Glycine max
agaggaattttactagcctaaaattttgccatcggcacatagaaagtgttgttttgtatcttttcgaagatcactttgttaagataaaaagagataagactaatgcgagaagtgcctcatcattgggtttcatcttgcttttaattgaagtctggagaatgaatatgacctaaattttttgaacttttgagaatttgaaaattttcagaaattgctgtgtgggagtaaaagctcattgtcacggtggacatgtgcagatattagaattttgtcttacggcaccaactgtacctatagaatttgctggacaaaaggaatctaggaagtgctctctttcacaaataatggggaaatcacgaaagtactcaaaaggtcatgccaccggttttgttccagattttcgccatgctgttgagactatgggtgaatcagaaggacttggtaactcgggaagggttgataatgagttgacaatgtcagaaatttcatgtgccccaaagagaaaaagggttgatgagagttttgatgtgccatttcaactgttatctttaacaaagatggcccgttctgggagaaaggacttgacactgagattaaaatccgaacttgaagaagtaaggaaacttcaaaagaaaattgctggtatgagttcaatcactactgaattatctccatatagtgacataagga

SEQ ID NO: 5552 - DNA, 732 bp, Glycine max
aaaacacctttgactacattgaaggatttgtgataataaacagaactggtctgttaaataactggagattatccttcaacccacaagacccggttcaagctagtcatttcaagtcggatggaagaactctcttctgtcttgaaatggccaaatacttcaacgtggaagaaatcgatgcagcaaatcaggtgaggccagcaacactcaatctaactcactggtcataaattttctttaggaaagaaaaaaaaagtctgattaaatgaacggtgtctcacttattttctttttgtgtgtgtgcttgtgcaggaagttgaggaacatttgtcccgattaagctacatcccatcgacccttttttcaacagaagtcacatttgttgatttcttagacagggtgcacatatcagaggtcaagttgcgttcaaaaggcttgtgggatgttccacatccgtggctcaatcttctaatacccaaaagccaaatacacaacttcgcagaagtcgtcttcgggaatatccttacagaaactagcaatggccccgtccttatctacccagtaaacaaatcaaagtaatgaatggttcagaaaatatattagtattaactctacaaacaaatattttagtcgtcaatatttaattgacatgttgttttgtttgcaggtgggacaacagaacttctgttgtgattccagaggaagctattttctacttagtggcatttcttacat

SEQ ID NO: 5553 - DNA, 706 bp, Glycine max
atttttttataaaaaaataaaggtattaaaaacccatatctaagtaaaaggtccagacgtaatattttttcatgcacatggagaaacttaccatttctgaattctgagcttaggaaatgccttgcgtagcctccgagactaaataatgtatacaataatttaactcggtagttgagcaaatgaaggacaactaagctaccaaacctttcaccatttcaagcgaaaatgagttacaagcattcttgctcttcacattttaaaaatggaattccactcctctaaaacgtaaaacatgccccagattttagaaagtaaaatgtaaaataataactaattaaatatcaaaatttgaaattcaattatttgataatattgattatatgtcccatatatgtatgtctatatttcattataatcttaatcgttaatttctccatcttggttattactctgtacttcgggggagcaaaattcttaaaaactatactcatgtcatgatttatgaagctgatatttatgagccctttggggaaagttttaacttctagcaattttgagtgtcactgtgttcttatagaattcattcttagttcactcttccttcaccaccaaacccctcccccaaaaaaaaaaatagtaacgtttacatctgggtcattcttatcgtttctctccatgtgcagtagctttgccaacaggtgcaggc

SEQ ID NO: 5554 - DNA, 816 bp, Glycine max
  misc_feature (788)..(788): n is a, c, g, or t
  misc_feature (791)..(791): n is a, c, g, or t
  misc_feature (798)..(798): n is a, c, g, or t
agaaagatatgtagtacaagatgcaggggagttctttgactcctctaggtatggaaatgcagttggaagtcttaaactttgcgaagattctaaggatgttgcaacatctggggtcttggatagtgcaagcactaatggttggtcttattgttcaaatgggcaatttgaaaataatatttctgatagtgaacctgctctaaattctgttattgatgatgagaaagagaagcaaggtgtggctggcaattcacccagatcgcatactgatgaaaagaatatggcagtctctgaagcttcaaagtcactgttggaccttacaggggattatgacagtcacattgggaacttgcaatatggtcatatgtgtaatggttatcctgtctctcctgtggtgcctagtcctcctaggtctccgaagtttccaaataggaatccatgggaaactgttcgtcaatgcgtacagattaatcacagtattcgctctcaggcaaactcaaatagtgtaatgggacaacaagtttacgtcataaatcatccttctctgccaatgacttcttttggttcagaagagaagagaaaagtacgaggaacaggcgcatacttccctaatatggtatttataaagtttatagttattaaatttggacacatacttcacacacacacagactagttttctagtgttccccagtcatctaattgctaagctcataattttgcagacttctcgtccttacagggacaataggccaatgccaggaaggggaaggggtcaagcaccaggtatncanggacatntgcaggcagcaagtcaag

SEQ ID NO: 5555 - DNA, 739 bp, Glycine max
ttggatcttcttcaggtcaaaaggaacatttttttgtctttctttctcttttattttccagtgtgtaatgtgtgctctgcttttttcttaaacattggttgtgattctggtttatcattattgctcataatcaaacaattcttattattagcacagaattggaattgatatacaagtacatcgttatatttgtttattatgtctcctcttatcaaggctatttcattttttacttattatttgtgaggaccacttgatgtagtaaattacattgacctccaatatttagaaaacttacaaaaacaacccttcaaattttgaatattacaccaatcacattgttagtttttgtaatacagatacctcctattaaaattttttcaggccatcttatatggagaaaaaaaaaattcagacatgaactagtgaaatttgcaggtttcattgaaataaaccatcaagggaaaactattgggtaatttgcaggtttcattaatctcaagggaagttagtgaaatttactagtcttaatgattgctcgaatgagtatggataccctatttgtgttgtgacaacagaccttcaaacaccaaatgtattgtttgttgttcaatattcgtaatagtttgcatggagttgacaaaaacactgatctcaaataggtattgcagattataactctagcagaagccgtaagccagttgctgtggttggtgaagctgagatgagaccaacaagt

SEQ ID NO: 5556 - DNA, 690 bp, Glycine max
atccaggtgcttatctctgtatacccgtaacccatctaaagagaacaaatgctaatacatataagaaaagaaatattcccctctatcttgtaggtttgtttttcattatgtgggactatgttgctattcacgcgggactatacttaagattcttgattaccactgctaacgaattcccaagtaactactttagcagcaaatacaagctacctttcttatatttcatgcttcttgagagggtggaccttacctgtgaaaccaaaaaatgcagattatcttccattatggttgaacacttcctttctaggtgtttgtatttgcttctgatagatggtggaggaagtgatgaattttaatgatgtgattctgataattgtttgccattgttcacaggctcaaaatgatgatttctctgttatcttcaatcttgaagattacaaaggtaaatcacatttggttgttttctagattgaatctggtttttataacttgccttcatgttgacgaggttaagtctgtttttagattatgtttaatactgcacataaaattttatgactaaccagtaaaagaaaattttctcaattgttgcattaatgtacatgaaatttcagtttttgatttttccattcattttgtgctgaatgctccaatttgagtgcaccctgtatcatagttgaccctgatggt

SEQ ID NO: 5557 - DNA, 706 bp, Glycine max
gtaacatagaattttaacccttcattgatgttgtcctttatttctctaaattttgctatggcagcttcaatctgcttgtaggctttttcacgtgaagctgaaataaatacaagaaaccatcaggtcaactatgatacagggtgcactcaaattggagcattcagcacaaaatgaatggaaaaatcaaaaactgaaatttcatgtacattaatgcaacaattgagaaaattttcttttactggttagtcataaaattttatgtgcagtattaaacataatctaaaaacagacttaacctcgtcaacatgaaggcaagttataaaaaccagattcaatctagaaaacaaccaaatgtgatttacctttgtaatcttcaagattgaagataacagagaaatcatcattttgagcctgtgaacaatggcaaacaattatcagaatcacatcattaaaattcatcacttcctccaccatctatcagaagcaaatacaaacacctagaaaggaagtgttcaaccataatggaagataatctgcattttttggtttcacaggtaaagtccaccctctcaagaagcatgaaatataagaaaggtagcttgcatttgctgctaaagtagttacttgggaattcgtagcagtggtaatcaaagaatcttaagtatagtccccgcgtgaatagcaacatagtcccccttaatgaaaa

SEQ ID NO: 5558 - DNA, 784 bp, Glycine max
tgctgctgttgtggttgctgctgctgctgctgctgctgctgctgttgttgctgctgagccctctgtaaaaggatttgttgcatctgcatgtgttgctgttgttgttgctgttgttgctgctgctgctgttgttgatgttgcgactgctgaggttgtggctgctgctgctgctgttgttgctctctcgccttaattaactgggtctgcaaagagagtttcacaaactataaacttcaagcagtaactcagtatttttcccctaggcaattccttggtaaaactgtacagcccagcatgccaacaattttacaagggcagcttatatattgaataatcagataaatagctatatcttgctaagctcatagttatcaattccagatagcagcatggagcagctgaccccaaaaccacaatagtgtgatagtgggatgacctctattaagaaatttccagatataaactaaataatttattttacatatgtataaatgctgaaaaataaataaattcccataactaaaggcatattcataatcataattaaaagtcataattttacagcaaacatagaacttaataataaaagtcaagttatatataaaagaaaaacaaagaaaaaagtacgctaggttacctatctaaacacaacactgaaagaaatataaaacaaaaacatagaacccctttgagatgaacagaacacaccccgaaggatgtgaatagagagacaccagacaacaatgttccagagtgtgggttggacagaaaccccactgcaggc

SEQ ID NO: 5559 - DNA, 650 bp, Glycine max
tttgcagttagttgcagttatgcagaagcaggtgtctatgctaattctagctctaacaccatagatgttgtggctgatgttagaagtgagcgggtatgaatgaatattcccctcttttagcaatttgagattatccacacattatgtgtttttggatatatttcgcaaaaatgttcacgtgtaaatgtctctctttgtagattgtagtcttaggagggaatggctttgttggttcttccatatgcaaggcagcagtgtccaagggcatagaagtcataagcctaagcaggtttgtcaaatgtgtaactaattggctacacctgtctgtctatctgtctcttcctctctgcatttatttatttaaccaacattttgttttacaggtcagggagacctacttactcaggtgcatgggtagatcaagttacttggatttcaggcatgttaacttaacctattactaagatacatctttttttttttcactgtaattggttaagggcatccaagcatacacaggaagagggtagagtgagagtaaacaccaaatcagttgtagagaagagtaggcaattattaagatcagtaatgatacattgccacattctttttcatatcattcaccgttgggtttgtttcagaactttgca

SEQ ID NO: 5560 - DNA, 702 bp, Glycine max
catgcctgcagaagtatttaaagcaaatcctattttatcatagttacttccaatttaccataatacactaaattgacatctattcaaatggttaatttgaacttgaaaactgtaaaggcatgacctaatattgtaccatgattgttgggtatccatacgttttatcaatcaaaggatacaagcacacacacaactacaaagacaacagataaatttgcaaagttctgaaacaaacacaacggtgaatgatatgaaaaagaatgtggcaatgtatcattactgatcttaataattgcctactcttctctacaactgatttggtgtttactctcactctaccctcttcctgtgtatgcttggatgcccttaaccaattacagtgaaaaaaaaaaagatgtatcttagtaataggttaagttaacatgcctgaaatccaagtaacttgatctacccatgcacctgagtaagtaggtctccctgacctgtaaaacaaaatgttggttaaataaataaatgcagagaggaagagacagatagacagacaggtgtagccaattagttacacatttgacaaacttgtttaggcttatgacttctatgcctttggacactgttgccttgcttatggaaaaaccaacaaagccattccttcttaaaactacaatctacaaaaagagacttttacacgtgaccatttttgcg

SEQ ID NO: 5561 - DNA, 744 bp, Glycine max
tgcctgcagtgctgttggtccaaagttttgattttgaatgctttccgtatctgtggtatgacaaaaattgaatgtatgtgtgtgaaagtttgaagtttcatggtttgggagtgagtgaaagtggaatagattatatgcttcagtttagatttttcttctttggaaacaccgaaacaacttaaggataccgtaaatttgttgtttctttttttccttttttgaatttttagctaattaaacaagaaggttctaattgaggttcaactggatctcgttttgcatctgcgacagttttgaatttgagtgctttctatgtgttgatttgcttagtgaagcgtttttcatttcacgttgaatttttttttttttttcttttggactcatgctaattttgtgaaattcgttttcctgtaactgaagagggtctggatcggggctaacaaatctgttaaattattgtctctggacgttaaggtagctaaaaattcaggagtttcattcgttttctcaccttccctgattcgtgtgaaagttaaaaatgttttgtttggaagggtatttttgtcatttagctaccggatggtgttgttgggacggattatatagtaggtctgttgcgtgtgtccttccctttctatccggcttgcggagtgctcaaatgacagaattgaccatctaccattctgtctttgactcttgtgtctactttactttggattgaattatctgtagcttaccattaat

SEQ ID NO: 5562 - DNA, 823 bp, Glycine max
tgaaattacaatagataattcagaattcaaaaaaaaaaaaataccaactccatcatttgaaacagggatggaagcaaatataaagtaaagtaaactaaatttatggaacgggaatgatgccccagcccaaggcatctaggttccaaaaaacacttaatagatgaacttacatttacctcactccaaaaagacaagtagaggcttgaatttgcaactttttagatttctgtttgttttggaacactaaaacccaaggcaagctcaaatagagttctttgttttgataaaacaatataaggaactcttaaattaggatatctttcatagtcaacttaagttctcgttaataaaagcaaaaacaacaaagttttatcccactaaatattaaagggtggaattactgaagttcacagagtgaaaagaaaaatcagagaattccaagaaaaaaaaagggtcttgaagctgaattttgcagcccattgaatagtaaatgagtatgttatgattgttatccattcttcgcaccgtgttgcatgtgcacattgtttccatgcgtccatgtcgtaaacaatgttgaataaaaacgaacggaagagctatctaccttagggttcacgcgagaaagctatacaaaaaggaaaaactcagtgactacgagttgaatataattaattaattggtttgaattcgagtaaccctagggtggtatttattgaaattgcacataaccgattaaggggggaaaaaaagaattgaccttgggtgtcaggttgagtagggttggggcgcttgagggcacttttgaggattggctttggagccg

SEQ ID NO: 5563 - DNA, 785 bp, Glycine max
acggatttgtgtgaaaggttaatgtagaaagagagtgaaggggtggacgcatagctgactttttgcaatgcacgagtaaatgcctttcttgtctgttttgactcctttttttttcttttttttttctttcttcatttacttacctcattttttctctctagctagtcagcgaatcaaccattaatcttctatttcctctaattctcttctctctatatatatatgtatctgcctcatggaaaatagacaacatagccccagttgcagaaccttgtctctgcatcatcataattctctcaattgaggagcccaaagggatcaaatctcttcaacccagaagaagaaaaacaaaagagaaattatagaattaagttgctatagctaatagctataactggcttagatataccatttttattttatttttattttggggtgtacaaaatgggaagaccaccttgctgtgataaaattgggattaagaaagggccttggactcctgaggaagacatcatcttggtctcttacattcaagaacatggacccggaaattggagatcggttcccagtaacacaggtaataaaaattcaaccttaaatttaacatatggttttgatttaatttcttcatttatttgttgggtttttcataattttgtgcagctgggcaccgtttattaattgtttaataaatcggtgagggacagtacatgtatgtatgatgtagtatatgattccattaattttgttttttggtttttcaggtttgatgagatgcagcaaaa

SEQ ID NO: 5564 - DNA, 777 bp, Glycine max
tgaatggggagttgcccatatcttctcacagtgttggagaacctggtatgtgttggtcttctcttttatcagttgatgggatctgccacacttattttagtctttcttccttcacgtggaatatgcaatatgtactgtgcaatgaccttttgagcaaaagtttataaactaaaccatataaatggctgatacactgtatttcaaaatcctctttataagtttgtaatttgaaatctgtgaaccttttttaagattagtaaagagaaaggataaatagattgaagacaagacgcttattataactaacatattttcatgaagcaggtgcaaagttggatgacaaggagaaagtagatgagtggatgttgcaccaaggcaatctatggcctgaaactgatgcctcagttgatcccgaaaaggccatgtaagcaccacagtaccattttaataaccatataatctgaaagaaaaatcctaaattatttaatgatgtgatataacatgatgcaggaaagagccactgtcaaggaaagtaccaataccatccggcagactcagtccttacagaatgatggttgtcgctaggctcctccttctattactgttctttcagtacagaatcttccacccagtacctgatgcaattggactatggttcatatctgtgacatgtgaaatctggctcgcattatcctggatgattgatcagcttcccaaatggttccccattgatcgtgagacatatcttgatcgtctttcaatcaggtcaagtgtcct

SEQ ID NO: 5565 - DNA, 776 bp, Glycine max
tatctcgcttacacatgaacagagctttttgttatcctctctgaattgtggttgtcctctgttactgtccacagttgtacttatggaaagcttattcaatgtcaaagtagggatctttttaaattgtttaacgttacttagccatatttaactcaagtttagaatgttgccctcttaacgttgtatcatgttgctataatgttgctttaggctacaaacacaaaatagctggttaataaagtccgatgttctgcgaatgtcctgtttgttgattttgatctgtcttgctcaaccagtccttggcctctatgttcttatgctcaggatacggttttttcatgcaatgtttcttattaaaagttagcttccaagtccttggaatatttcatcataaactaacagatatatttaaattcctaggcagcaatgcttttctgtaactgaaaatttgtagcattcacggtacagagaagcattcaccttccttctttagcaaactactaagtaattctttactatctttatttacttacagcttgttatgtgcaacttctcaaatgatgtcaaacactagaattcatttaaaactcaaaaaagaattaaactgaattcttgctaggaacagtgttgtcaaatggcggttatggtggcgccgtggcagatttttgaaaaaacgccaccaaatagcggtggtgttgcaggtttcaaatggcagccaccataggcttaacggtggtggcggaatggcggttatggcggaagaaactctttttttt

SEQ ID NO: 5566 - DNA, 807 bp, Glycine max
cagattattatggatccaaggctgagcattcaaagaatttctaacctgagacacacagaaggagaacagtaagcaaggcaagttaaatgcacagcaggaagcagttcaattccacaacaaagtttgcatagaacaactaattagattgagatgactatatgaacataaaatgtgtatgagtgtaatgcacacaaatcacaaggttggattaatatccttctatatttttcttgaccaataaagtaataggaccttctagagacagtacaactcaagtgaaccgaaaaactcacaaagattgagagtaaaataaaacagagagagcaacagaattaaactgactggtctaattcaggagaggtagacagaacaccaaatattatcatgcattccatttcacaatcaataaggaaaaacatcttaatgaacttcatctactattttgtaaaaataaaaccaaaaaagcatcaaagatataaacttgcattaaagacacccatgacaaaataccaaaaacagaatttaacttgttgcttaagtgattattagttattatagatttcgacatattactgtaatgacaaccatcagtatcaagaagtagacaatgctaataaacaattcattgtattgcatacagaaccttaagtctcaaatctgttttattctcaatactaggcaatgaaaaattctactaagagattaacatctggaagccagatggcaaatgatctactgattaacatcatgataataacggttctgtccattccacagaaaatgtcatatcagttggttgattatgca

SEQ ID NO: 5567 - DNA, 842 bp, Glycine max
agtgctaaaaattggcttcaaagcaaagtcatttccacaatcacccgagtttctttgctttgtaaaaggaaagggtgtatgaatatgccttcaatgtacgataacgtgtatcaaaaggcaagagtgatcatgaggggaagattttattggtcataagacttcaatgttgatgctgcaatagtagctgctcacatgaacgacacctcttattattttgtgacttgttttagacaatgaagtgggtaaagaaagctgagtcttccgccatgtgttgatgaagacatctaaatattcatggcttatgctcgatatgggatcagatgctacaacaggattttcgggagggtaccattacgaaacaacatgcgtttgaaaaatcagttgctttataacttgtaatggttttacaatttctggtatgcattgtcaatttgtcatgttatctcgtttacagcacaagattgtgcagaaggcaataacttattaaaactccgttgtcaaattttattgaccaaacattgtcaagatagaactttatttacaatttcaattttttttcctcagaaaatatttgcaccaaaaaggagagaaacaatcatttttttattaatcaattaaatgatgtacatataattacaaggatggtaatctgaatgcaaaagtggaaaagccttaccagacctaaacccgtcttaaatttgatcaacttccttccttccttccttccaaccccaggcaattacataaagcatgcatatttattgtatgcatctctctaaaacctcacaacctatgacaatccatactgaaaggcccctgagtgcctgtgagcagcaacagct

SEQ ID NO: 5568 - DNA, 956 bp, Glycine max
ttctgtaccccccaaaaataaaacattaatcattaattaatattcatgaacaagacgcacattttatattctatatatactatatgatctaatgcttatgttttagttttcttcttccttgctatgctatatttggtcttttctttgagatgaatagtatagtgatggttggttaggaaaaaagtgagagtgtatgtatcattatgtatacaaacataagcatctgttttgtttccagcaggggttttacagtaatgccaaaaagggacaagcatcatcttcatcttcctcaccaacaacatccaacgagtcagtgtccccaaaagcagcatcatttgttgtgaaacgtacgtatatagttaccacagatcaaaacaaaccctttttcagaaacacccatctccaaacaattatataacatgagacttacataatcatatgatgttttttttttctctacccccccaaccatgtaaatgtccttattattttgtttgatttctttttcagcacctgagaaaaagcaccgtctcccttctgcttacaaccgtttcatgaagtaagtgcaaaagagatgtgtacttcttttttgttcaacaaagtttattcatgtaaatgtcttttgctctaatatcacaaccctaaacagtttaactaaaaaagaatacttgttcaacaaagttttatcatcaaatgaaagtttattcataaatttgattatgaagcttagttaagaataacttattttaataatttcttgagaagggttattgtcttattgaaataaattcaaaaggatttgtataaaaaggtcataagttgctttcgtaaacttcatttttttttcatttactacttggttgatgttgttgtgaatgtcagagaggagatacagcgcatcaaagctgcgaaccctgagatcccacatcgagaagctttcagtgcgtcaagtcaga

SEQ ID NO: 5569 - DNA, 668 bp, Glycine max
tgctcattcaaaattcactgttaaggttcaatttgttagattcaaaaaagtgctttttaggaattttagagattttaaaaaaagtataaattcattcttacatgtttttaattgtttacaacaacaaaaattactttttatataaaataggtaattggttttacaactaagaagtccacaattattttaagcttaaatacaattttaattttctattttgcagtttggtcatagttgattctttatattagaaatctgtaattataatccaatttgaaattgtgtctatatttttagtttgaatataaaattttgtttttattggttataggagtacccttcgtggacatactaaagaaaggaggagttctcccgggcatcaaggtggacaagggaaccgtggagctcgccggaacaaacggcgaaaccaccacgcagggcctggacgaccttgctcagcgctgcaagaagtactacgaagccggagcaaggttcgccaagtggcgcgcagtgttaaagataggtccaaacgagccctctccgctctgcatccatgaaaacgccaatggtcttgctcgctacgccgccatctgccaagaaaacggcctcgtccccatcgtggagcccgagatcctctccgatgggccccacgacatcgcgaaatgcgc

SEQ ID NO: 5570 - DNA, 662 bp, Glycine max
ctcaccgtatgctccgctatgacctcagccttcacacgtgcgctttcggatccaggagtcaccatgttgggctttaacagcgtgccctccaggagcacgtggtggtcgtttagggctttatagcatgcggccagcacgcgctccgttacgtcggcgcatttcgcgatgtcgtggggcccatcggagaggatctcgggctccacgatggggacgaggccgttttcttggcagatggcggcgtagcgagcaagaccattggcgttttcatggatgcagagcggagagggctcgtttggacctatctttaacactgcgcgccacttggcgaaccttgctccggcttcgtagtacttcttgcagcgctgagcaaggtcgtccaggccctgcgtggtggtttcgccgtttgttccggcgagctccacggttcccttgtccaccttgatgcccgggagaactcctcctttctttagtatgtccacgaagggtactcctataaccaataaaaacaaaattttatattcaaactaaaaatatagacacaatttcaaattggattataattacagatttctaatataaagaatcaactatgaccaaactgcaaaatagaaaattaaaattgtatttaagcttaaaataattgtggacttctttattgtaaa

SEQ ID NO: 5571 - DNA, 776 bp, Glycine max
atgatggagtattcaattctatccaaagaggttgatatcttaagtgacgaaagtctcttcgttattggcattctttccttaattttgtatctttccaccaataaagcacttgaagagacttccaaggccattctttttaatacttgtataatctctatggtcagcacaccgtagtctgtgctgcttcttcgaagggacctgctttggttgaccatgacgagggaacatgcacaggagaaactttaatatttgttcttttgattcattacttcgccgttaaaaggtaagccggttcgaatcagtaataagaaaccttttatattctagcttgcatgctatcctaccagggttcgtggattggcaaaacttctttgcttcaacgaatccatcggagccgctagctttcattggcatccgttgccatgacttgtgcagacttctgcattttggttctcctgtaatcaagattgctgcttcttatagcctgttagagttatttaacagaatatcagatcaaataaacagtgatcatgaagagttgagatgtactattgggtacttaatgcccataaggattggaaggaatggttttctataatgatctgagagtggctaaaaattgttccctctgtctgtcaatgattctgggatgggaaaagctgacaaaggaaacaaaagtcttagaagagagtagctggtgtagattgattatagaggagatgacagtatctttggccgctcctgctttagcatcacaatcattcacgaacaatcaa

SEQ ID NO: 5572 - DNA, 660 bp, Glycine max
ttaatcataaagaatagtttttttctttttttgcatgcattgcctttagcaatattttgctttttaagatgccaaaaggttcatcttggaagttagtaccagcaatatttattggccacgaaatgtaaaaagtatgagtatttctgtaagttttattgctggaatttctgtccataactataaccatatccccatgtgttagttatccggaatggcctgaaataaatgagtcccattagttgtctttgtatcccaacaaaaagttagtttgcaataggaactacaccaacataactacataagtttgtgttaccatacaagcctttgaagcatatatgtacatacttttctaatgtcaagagaagatgctatgatccaactattccaagcccgtttcagctgtttcaaaaccatatatacatatatacatatatacatagcagcttggactgagttactaaaaggagagaacttatggatgcatagtcatggcctctgagcaaaaaataacttacctataactagactagtggagttactcggattccctaattgggaaaatccagtgaacaaaaaagcattccagtccattagatatgaaggatctgttggtgctttttcggtcattttaagagctaacccaacagtggctttgttgaa

SEQ ID NO: 5573 - DNA, 640 bp, Glycine max
gtgtttaggaacgcaaattctaatttgtgcatccttttttatcattcactaatcttgcacctctttttctcttctcttctgggttatgttttgttttgtccctagattgtcatggaacctcatagtgtctctttggacgaagatctcaataatgcagctaaacaagttgaggtatgtgcctttatcgtttgtggaagatccctacctcaaatcccatctttgcttgttttcacctccggttttcatagctcatatcttaaatgattgtcactggataggatgacatgaaatcaaaagcagaagcaacctttactcccgaattgctccagcagtttgccattgtaggagaatctggctttgagactgttttacaaaataatggtggaaaaatacccataggtggtcttattagcgtgaaatccagcaaagtgaagcatgaaaaggagaagggaagtcataagagtgacaaaaagcggagtaaagataaccacaaccataaatcaagcaaaaggaaaagatcttgaattgaccatgggaagaaccacccaagataaaactatgatgatttcggggattgttggtccttgagtcagaacagcaatataggagcaaagtgaacgcccaaatttgaaggggaatc

SEQ ID NO: 5574 - DNA, 777 bp, Glycine max
attgatactaatgccgtcatattgtccactaattcccatgaaacatgaaaaataaaataaaattgaagtatagcagcaataatacggaatcctgcaattgaaatttatgaagaatatgaactgagcttttgtcagtggattcccccttcaatttgggcgttcactttgctcctatattgctgttctgactcaaggaccaacaatccccgaaatcatcatagttttatcttgggtggttcttcccatggtcaattcaagatcttttccttttgcttgatttatggttgtggttatctttactccgctttttgtcactcttatgacttcccttctccttttcatgcttcactttgctggatttcacgctaataagaccacctatgggtatttttccaccattattttgtaaaacagtctcaaagccagattctccttcaatggcaaactgctggagcaattcgggagtaaaggttgcttctgcttttgatttcatgtcatcctatccagtgacaatcatttaagatatgagcaatgaaaaccggaggtgaaaacaagcaaagatgggatttgaggtagggatcttccacaaacgataaaggcacatacctcaacttgtttagctgcattattgagatcttcgtccaaagagacactatgaggttccatgacaatctagggacaaaacaaaacataacccagaagagaagagaaaaagaggtgcaagattagtgaatgataaaaaaggatgcacaaattagaatttgcgttcctaaacac

SEQ ID NO: 5575 - DNA, 782 bp, Glycine max
aagtcattatggcagattttatggcagctggtgaccagtgaggatgagagcttttgagcaaagcagctacgccactaagatgtgggcatgacattgatgtgccagacataatgttgaaagtggattttgaatcagtatcgttattcagggggaatggccaggcagctaggatgttcaagcctggtcctatgatgtctggtttcaaaataccaggacttggcaagctgggacctcttccagagaaggatgtaacaacaggagctaaggagtttccaattatagttcccttgaataaaatggtagctgtaggtgttgcggtggagtatatataggctttaatcttaagtccagcatcatagcttacatgtgttgtgggaagaacatgtacatcaatattgagactaaagccactcttttcatcgttcatgagaatcatggctgcaccaccagctctctttacttcctttcctttggcaattcttcctatacctcctcctctctcacacaaaacaaccttgcctctgaaatcaatatcgttcaaggatccattaccacaaaatgcatcttcttgtttgccattcattccagcatatgccaagggtagcaatgttggagaaaaatcagaaggctggaaaatagattcaccatcaaattcttgcccgtttcctagctttgctgttgctgcaatgcttctgttgatattgcttgctccaactgtgaggatccaaggcgctccgttaattacggaaccagggagagggccatcgtttcctgcaggcaac

SEQ ID NO: 5576 - DNA, 682 bp, Glycine max
ttgttgtctaagtactgaaatgcatttgtttgggactcaagtttatcctttttggtttaaaaatatgaattcattatttacattcatggactttcaggaagctgcaaacaatgataatgggaaagcacctcattcctcgtggaggaattatgatgattttaatgagtatttctggtaataattctttattgaccatctttgactatttcaatttttttttattccattggctgaccatccctccttaaggtcactccgttgctttgagcttagttggccatggcgcaaaacttcttcgtttttccaaaagccactacccagatcaaaggtttgttttgtttacaattatgttagactcccttctaattacattacaatgcagtttctttctattgcattcatatcttggatgttgaatactgacgtgcattgtggtggcattaattaaaaggcaggcaggttattgcatctaattttgaattaaggggacgtttggtacatgggaaatttttagtgtcctgggacttcgaagttgggaaactttgtcccatgtttggtttactttttaaaaattaacatttccaagaaactgttcctcaggaatgttttttagctatgtttcccacaaaattggcctcacggggtaggtgggaatctatctttcccgagttaaatttttttt

SEQ ID NO: 5577 - DNA, 767 bp, Glycine max
aagctccaaatcctgcattatttaccgattaccacgccttaaggcttaaacacccttcaaaaaattgggcaatcctgttgcgctactttagcttgggtttcaggatcggccgtattattgaagtatctaaccttgaggtcaaagatctgaattccatttcaaaagatcaaaagatcttctctaccttgtgctttgatctcttctcgagccataaccaatatacactttggtatcttcccaaaacaattatctaaacagataaaaatacaaaaaacaaaagatgattttatacagctgcatactgtctaataaattctgagtgtgcaatagtaaaccccaatactttaaggtcaatgagcaataaaagagacatgcttgtgtctttcatgcatgataaaaatatcacatcatcttacacaaggaaacaacaattccttcatgctcccaatgaatgatgaaacaaagttctttgttaccaacatagttcaactagcatacaaaatgtataagagaacttggtctactctctacttatttaaagtggcagcagaaatccaaatcatgctttttaactaaatgtctcaatcaccactatgttcattcaagatatcagtaccctttatagaggcagagggaattttggggattctttcatgaaatgtgctttagcaataacataatgcaaaaggctaaaagagcatacaatgtgtaacttgtcagagttattttgtttttcaatgccatgtatataaatgcgtataaagagc

SEQ ID NO: 5578 - DNA, 756 bp, Glycine max
aaggatgtgattgtactaatggatgctccgatttggagaaatgttcatgtgtagtgaaaaatgggggagagattccattcaatcacaatgaggctattgtacaagcaaagcctctggtctatgagtgtggacctacctgtaaatgtccttcaacatgccataatagagtcagccaacttggcataaagtttcaacttgaaatatttaaaaccgatacaaggggatggggtgtgagatccctgaattcaatcccatcaggaacttttatatgtgaatatataggggagcttcttgaagacaaggaagctgaacaaagaaccggtaatgatgagtatctttttgatattggaaataactatagcaacagtactctttgggatgatctttcgactctcacgactctcatgcctgatgcacacacagcttcttgtgaagttgtgaaggatggtggtttcaccattgacgctgctcagtttggtaatttggggagattcatcaaccatagctgctcccctaatcttattgctcagaatgtcctttatgatcaccatgacaccaggatgcctcacataatgttctttgctgctgataacattcctcccttgcaagagctgacttatgattacaattatgaaatagatcaagttcgtgattctgatggcaatataaaaaagaagtattgctattgtggttctgtggattgtactggcaggatgtattgagggcaacaaggttaattaatgtaatagtgttttt

SEQ ID NO: 5579 - DNA, 739 bp, Glycine max
aagaacacaattacattaattaaccttgttgaccctcgatacatcctgccctcaatacatcctgccagtacattccacagaaccacaatggcaatacttcttttttatattgccatcagaatcacgaacttgatctatttcataattgtaatcataagtcagctcttgcaagggaggaatgttatcagcagcaaagaacattatgtgaggcatcctggtgtcatggttatcataaaggacattctgagcaataagattaggggagcagctatggttgatgaatctccccaaattaccaaactgagcagcgtcaatggtgaaaccaccatccttcacaacttcacaagaagctgagtgtgcatcaggcatgagagtcgtgagagtcgaaagatcatcccaaagagtactgttgctatagttatttccaatatcaaaaagatactcatcattaccggttctttgttcagcttccttgtcttcaagaagctcccctatatattcacatataaaacttcctgatgggattgaattcagggatctcacaccccatccccttgtatcggttttaaatatttcaagttgggaactttatgccaagttgggctgactctattatgacatgttgaaggacatttacaggtaggtccacactcatagaccagaggttttgcttgtacaatagccccattgtgattgatggaatctctcccccattttcactcacatgaacatttctcca

SEQ ID NO: 5580 - DNA, 565 bp, Glycine max
tttactgtttcagtatcttttctcttcttgtcagacgcattaatcatgggtgttgagaagttcccaaatgtgttttgcatggcagaaccaatacttgcaatagaagaaacacctaacaaaaaagcaaagcaacgccaaacacatcatttatataacaaaaacattcacaatgaagattgctaccacaacaaaaacaagaacctctcaaaatctcttctagcatctatccaaactagccttatagtttcaatgggattaaataaggggctgaatgggttgtgggatatggactcaatgacaagagggagtagcctccccattacatgttgcaaccggagaaatcttaggaggagatacgtatgtatgatcgccatatggaagtgttgtaagaggtgtccttgagaccggtgtgttggttggaacaagaaattaatgctgatttaataggcctttggtaacactaggtccttgaacctgtgatacactgggtacacaattcccatatgatggccaagaaactacttgattgattattgatagcattacttgacggtgacaatgtcag

SEQ ID NO: 5581 - DNA, 781 bp, Glycine max
ttccctgaacaaatgagaataatagagtccatttttgtgcctttcgatattataggggtcctaggcggcatggttctcgttgaggcattgaaaataaaatactttctaatctgtttttttttttttttaacaatttgtacacaaaaaaatagacagagagagagaatgttttcactacttcctctctgtataaatccttaaaattaaaaaagaaattaaaaacaaagtaacagttttataaatttaaaataaagatagtcaaagatcattttaaaaagtgagaccttaaacatttgacatgcggtggtatataagttgaccatatctaatgttacattgatgcccactatttattcctctaaatttccatcattattataaaaagtcaatattaaaataaaatatatcacattaataaaagtaaggataaatttgtcctcaaaattgtgttacaatgataaattaattactgaaatataaaaaatttaaatttaatcagtaaatgcggtaaatgtgaacaaagtatacagttaaatgtgttaaattattttctcattaaattataatatttaaaaatcaatttaacaataaattatatttttcaacaaaaatttagaaaccaattaatcatcaaattatctatagattaatttgtcactttcaagatatgtagagactaaatttaaattttcagctttcacaaatcaatttttcaactcctcacgccttaaatggacaaatttcacgatttatcctaaatttaatttaaaacatatgtaca

SEQ ID NO: 5582 - DNA, 859 bp, Glycine max
ctgcctgcagactctgttaagcggagcaatgaccaacttgtacacgtgcctcgatggatttgcttacagcaaaggacgcgtgagggacagaatcgagaagaagctgcttgagatatcgcaccacgtgagcaactcgttggccatgctgaacaaagtgcctggagtgaagaaattaacaacttcggaatctgtggttttccccgaatatggaaacatgaaaaagggtttcccctcgtgggtgtcctccaaagaccgaaagcttcttcaagctaaagtgaaagagaccaagttcgatcttcttgtagcgaaagatggcactggcaacttcaccactataggggaagcactcgctgtggctcccaactccagcacaaccaggtacgtaacaaaaaagattttttcacaccaatgtgatggattataatttacactagtatgtataaatgaataatatagtaattaacaaatgggatacaaagagaaaaagagagaggtgttggtagagagtgaaattttttttttaagatttttttattaatgccttgtatttgattgggaagtgtatacactatacagtgagatttttttatgtaagaatcggatgaataaatattaacagttaaattaaaacgagtaacatgtaactctttttaaaaatcacattacactttttaagtaatcgtgtaattttaaatctgattatctatgtatacatttttttaaggtgattatctatttatacttatatcacttagatttattgttttcaatctcctacagtcctactttgatttatatatatatatatataggtaaacttagatgtgtgtgattgatataactgcaggcataaggaatg

SEQ ID NO: 5583 - DNA, 738 bp, Glycine max
gaaagtggagagttacatcctggtgaccttaaaccagcattggcaaagtcattgaataaaattctggaggtgacgatttctgattatgttcgtgtgttgtattttttcttccaagttttaaaagcacaatttcaatcatgtatactaggttgtagtgttattactttgcattgaaacagggcattagaaggcttttgaacatatatactgcaagcctattgcttttcatattcctataatcgtattgatttgtgtgtttataatttgttgggcttaaaattttaatgtggtttcaatctgcaaatatcaatgtggtagttaaaataattcaaattgtttaatccaacagattctccaagttaaataattctgtttaaatagtgtactgtttacacttcatccttctgcatttttatgatcaaaccctaacgtttttattgggactcaagtggcttcgtatatttgcttcaattattagctttaggtatgttcatgtctctagtaagttttttcacctgggagaggaattgataattagacaccagagctgctaccctcatgtttaggctgctctggacattatatcctactggtgctggtagcatcttactattcattgtgaacttgtacaaagcaagactagtggtgttatagcttatattttatgtgaactatggtattttttctttttatttcttcatttctagtatgtggcacaagctcaattattgtttcttg

SEQ ID NO: 5584 - DNA, 443 bp, Glycine max
tttagtgattgtactgttcagttggaccttttagttgcctttgtggcaccaacttatcaccaccatgagtaggatgtgatggatccagtactggatgaattgagaacataagtttgtttcatcaatatatcttgcgatgtttcctccctcagctaattctgtaatgtttgtattcttgtcttaacagtatgaagaaaatggaaaagtagcggactcaatgcttgtaaatactgcattaatgctggtatatgttaccaagtttttctggtgggaagctggatattggagcacaatggatattgcacatgatcgaggtttacatatgctctattcttgtttctgttggacatacctgttcattccctttgttctactattttgtaattttgaagcctgtttattaaattagaaataacagtatttgggggggggggggggggggg

SEQ ID NO: 5585 - DNA, 718 bp, Glycine max
ctatcagaaatcaaatccctccaaccaccatatctagacaatagaattctggcccacaactgattctgattattttccaactcccacccccatttagcaagcaaagcctcattgaatttaatcaaatctttgatccctaacccacctttactcttaggtaggcagactatgtcccacctcacccagggaatcttggtggagtcttggaggctgccccataaaaaattcctttgtatagatgtaatcttttgcaccacaagcttaggaatcttgaagaaggatagcaaataaatgggtaaggcttgttaagactgaattaatgagggttattctaccccccattgatagatttctttgcttccattttgtaagtttagcctcgaatttgctaataatgggctgccacacaaacctacttttagagctcacccctacaggaattccaaggtaagagaatggaatatccatttgactacaattgagagaaaatgctgcctccctacaccagtcctccgatttgcccaaacacccaaatttgctcttattgtagtttatcttaagaccagagaccaattcaaagcttttcaggatacactttagaattttaacattatcattagtggcagccccaaagaacaaggtgtcatcagcatattgaagaatattaacttcctcttttttctttcccacttggtagctgctgaagagatttttttct

SEQ ID NO: 5586 - DNA, 795 bp, Glycine max
agctcctgactgaggtttactcactcccattgtcataccgttaactggaggaggaacttgtcccataccatagaaactgcatcaaaggtcaactcggtcaacaaaaataaaaaaaggagggttattgacagcaaatgcattaaacttgaagcaagttggaatgtaataagacgcaatgacataaagggaaaatgtgattaatttttcaagcctaatggcaccaccctcagttacaaaatgaaaattctagatggacagaggatgtatcttccacagtcaaagtggttggaatggaaacagaaccctcaaaaatagccttttggtacaacagtctacagtctaatttgttctggcgggtgggaccaaagtggattggaaccaattatcatcctaggattattcagaattctagggatcgacatcaggtaatattcgagtaaaaaatttctacatccaaacagactaatttgatgttaagcatgcaaactaatgacatacctggatggtggatattgaacagaactccctgcaaaatgtgctggggtcatgttcctagtctgaccctgaaagaggagaaacaagttagtcgctggacaaaactaagcattcatcaacatttggattacttcagtccttacctgcacaagtttttgcaactctccctgaccacccatgggcattactccaggaattgaatagccagtagctggccaactttggataggaacattgggtctaggttgttgtatgctagcaggatacctaggatccccaccagaagatttagctgcaggc

SEQ ID NO: 5587 - DNA, 784 bp, Glycine max
aagaatccctttctcgtgtaaattcttcttaagttctccgcttttttgcatctccaacacaatatctgatccaccaataagctcacccttgatatacagttgaggataactggaccagtttgaataaaccttaagcccttgacgaacttcttcatcagtaagaatgtcaaaactctcaaagggaacattttcttgctggagaatttcaactaccttcctactgaaaccacacttaggttcatctggctttcctttcataaacagcataactgcacttgaatttaccaggctttccagacgagaggataaggttgtactcaaatcagtagattttgagatgccacctttgccgtttcctgattctttctcttttgcttcattagtagtatcaattccatgatctttaaaaacttccttcagttccccactctcatgcatagcaattgctatgtcacacccaccaagaagttctcctttacagtaaagctgaggaaatgtgggccaattggaaaacttcttcaagccttcacgaacctctgagtctgataggacatcaaaacttccaaacttgactctctcttcgttcaacacaacaacaactttcctgctaaatccacattttggctcttcaggagttcctttcatgaaaagcatgacaggattagagtcaacaagctgctgaattctctttttcagaggaccactaagccctggttgaacttgatttttctcctttgaagaatcattgtcttttgctaattctttcaccgtttcaagaacagaa

SEQ ID NO: 5588 - DNA, 739 bp, Glycine max
gtatcaatctggctaaaggtattctggaacatcactcgaaagggatcctagattttgacaaaccaaggaaattgctcgtagattttcgaattggcaagctcatcacaggtaatatacataggttgcaggtttctaattagcattttaggataactttttttttcccatttttgattaattaaaatcattcagattgataattcacattttctgatcatgttcattaggacatttattggttgcaggttatgtgtttgatcaaatgtcaagatgatatttttgggtatattttcttatttcttattggtatatttgagaggtctgagtgtatatgctttcttctctacatcacgggtcttctctttttgtttgttttataaatacttctatgggatattgtgaacagcagggaacactccaaatgtagcatacgaccattgataggctgagaaagctctatttccagttatctgattttgtttcatctgtatttgagaatgttgtaacggttttctattttatggtctacaaattccatttatattattaatcaatcaacatgattgtgttttatggtatttcatcatcaaatgtttttggtagagttgcctactatgtaaggagggattcaaattcatgagaacaatgcactccatgtggtcttaatttttattgtgttctctttacaggcatgtcatcaggaaaaagttcagtgacaagtttccagggatcacctgta

SEQ ID NO: 5589 - DNA, 690 bp, Glycine max
tgcctgcagttaagtttaattttgagattccatgctttagcctttagaattattttgtctgttttataatatgatttatgttgaacacacctacaaaactgctactttattttgcttctttgaaatttgttcttagcttcattttttcttaattcattgacacggtaatactgtaaatattaaatatttatcttatgaatgggatgattgggggtgagccccggcacataaataaggttgctgtcttgtgagttggaggtcatggtttcaaatattggaaacagcctcccctcttgtggtaccttccctagacctcactgtcgggaaccttgtgcaatgaatcacccttttttaacgaattggactggattacttctacatttttttttatactttcatttttttcttgtgaaggtgtaccaacattgcccccaaattttgaggaggaaacatgggcaaaattgaagtcagctattggtgctatatttatgaagcaacctgtttcctgtgacttggagaatctttatcaggtaatcatggaaaacctttttattttattaagtaatgggtttaatttagccctgcgaatattcgtcacacattagctcattagagttttatgggaactcaattcttttccataagctgtgaatgatctttgcctttacaaaatggggggaaatctttatc

SEQ ID NO: 5590 - DNA, 796 bp, Glycine max
agtttaactgttgaagtttgagtaatgtacgcagacacattgaatctatcccgtggaatcttttataataatatcaaaccaatgttattgatgcaatgagttaaagatgatgtaattgtctttttttaataaatttatgtgcaagtaatgttatgcttaaagtttgactatatttgatccagtagtatgagacttcattgcattcacacgtgtacaaaacagaaattatgcagtctgacaccaccaattcttttcttatgtttggaatttaaaaaattaagacatgagaatgctcactctctggtcaaccaatacagaaacagaaatatagatcttttacgtttcatgtttcaccagctctcaaacctctcataagttaatctgaaaagaaaataaagggcagacttttgccataatattgaaacacaaataaacatgctgatcatataactaatataatcatatacacaccactcggtgatatgttatctcaacttcttccctgcttgcatcagaagcaaaatatgaaactttaatcttttcagaagtaaattacaccaataagacattgttaataatcaagaaaagtttaattgaatccacaggttttactgagacgagctaaaagtggccattgcatccatttcttcttgcaatagaagagcatcaatgaatcaagattttcaccttgcatcacatcatctaccgagtgataagtgataccaactgtatgatcagttacacggccctgaggaaagaaacctaatattaggaggggggaactcagacagaaagt

SEQ ID NO: 5591 - DNA, 722 bp, Glycine max
atttgcataaaattataaaattgaacacaacaaactagtgaacaaacaccaaaaaataggaagaaaaacttataattaataagaattcatacaattaatgacaatcaatgtcaataattttgggatatctgagaagccctattgtagtttcacacgtgcctttttttttttttttatctttaacagaaagaaagttacttcatttcacacacatgcctgctacctgtctttaatttccgttttacattagacaaaacatttttttaatcacatggatggagatttttcaaatggttggtttacctcaattgtcatacctatcattatctttcaattgtgtgttttaggcgggttattattatgtttcacatactagtattggtaagtcatgagattatactaccaataggtatcttttggatgagctttcatatgggcttcaataataacaaaaagaggacttttattataaacctacgcctaggaagtgatttgaaaatgaatgatttatggattagcaactaaaaattgggaaggaagtgatatgaaaatgagagatttatgaacaaaccaactatggaaaggaaaacttgataggtaagagctgaaaaggagtgatatagaaattaacaaactactagtctttatgggcttctcgattgtcttcagtaataataatggaaataaattaagatgaaataatggtatttgttaatttacat

SEQ ID NO: 5592 - DNA, 796 bp, Glycine max
actcatgacgaatcttcagaatatctggattaaactcagttccaacagaatcctaataaaaaatatttaattaaccttgggtggcgcaatcaaatcaaaaaggaaaaaaaatgaaagaaatgagcttctgatagatataaatattagatacctgtgcaggcagctggttagccaatgagatcacgccttgagacattagagaactaattaaattagtatatccaacagttggctgttggcttggcataaatgcaccagcatttggatggggtatcatttgagatggagcaggagggcgaccaggaggtaaaggtggatgggctccaccctgtaaatgtaaagggttatttgaaatactttgaaatggtaaagggaatggtagaactggtaatggatttgacatggctgtacttatagaaacaccatgtccctgcaatgaactcccatgactaaattgtgaggttgatggatcctgagaaggaaaaaactgtagttgttgtgcctgcccatgattttgctggttggacgaaattactccagaaagctgattaggcaactgatgtatctttaaaatacttgcatccttgttctcaacactgtcaaatgactgttctggcataaatgaagatttatttacaacatggttcgcaataggattactagtattcatggcatcaaactgactcctaacatgtttttgcaacggatttatgatgggtggccgagtgacattcacatttacagaaggcctcatttcaaaaggtgctggcaaaactgatgggtgagcttccatcct

SEQ ID NO: 5593 - DNA, 745 bp, Glycine max
ccaagcttgcatgccctgcagattagagtctgatctgcatttagcatgaattatggggcctaactgtgacctatccatgcctgctgatgtttttctagcgggtgcattgaggtatgcagctcctctatacatccattcctccatttcatcactgtaaaactcatcaaaagactctccacataacgcacatgtactctggtcctcttctgttggcactgcaaactcttcatgatctttcctttcttcataatctatgctttctgttgccaaaaaatgtggaactgattctgttcccaatgcctctgcaccactaagccacagcttaagactcgcaaaccacttgcgagagggcttctgcttacagcttttagacatccgattcttagtcacatgccaatccatatgactactgtgtttctcttggcatctgaatcggagcccacaagttttgcattgtctagggagatcacgatacaaggcgttcgctggagactcgtgacgaaccttcagaatatctggattaaactcagttccaatagaatcctaaaaaaacaatacttaaataactcttgatatggaacaatccaatcaacaaagggataaaaagaaatgaacttatgatagatattatattagatacctgtgcaagcagcttggttatacaatgagatcacgccttgggacattagagaactaattaaactttttgtcttatgaaaggggtattttgcaaaactttggactg

SEQ ID NO: 5594 - DNA, 732 bp, Glycine max
tgttgttatagtcttcttgacattgtacacaggtattttttttttttatcaaatttcacttttttctatcctacaacctatacacaagtcattcaatgcaatgactgtataaagatagacataaacttaattgacattttttgcatgcaacatattggtatatttttaatttcaatttttttgggaaaaatgtgtttttagtccctatactttcagtcaaacttgattttggtccttgtactttcaaattgtttaatttagtcctccaacttttgaaaatatgtgaatttcgtcccttctcatctttaaacataacatttagtggtggtttttgactgccacgaagttggaggagggactaaattcacatattttcttaagttagagaatttcatccatttaaaagtatggggacctaaaccaagtttgatcgaaagtacactgaccaaaaattcatttttccctatttttttaattaccaaaaccaagtttttccgttctattggccctgaacaatggctcttaattgatatgtatgttttacattttactatacaggctttggactccaatagatggtgaatttgatgattacatcattaatccaaagcctagtggctatcaggttaggctttccttttcattttttcacaacataaaattaaaatgatcttgttcttctagtcttgagaattgtgcttgtgattgtattaacgtgtttaaattgcagtc

SEQ ID NO: 5595 - DNA, 690 bp, Glycine max
tgcctgcagaactggatcgtatccagaattatactctctgtagtactatagttcttcgttaacactagtaatacatcttacacctgtaacatgcggctattgctctaaagcttccgccgaaagaattgtaacctattgaagaaagaatgaacttaattggtgactttgcccgatacacaatctcctttcactacaactgccgccagtgggccaaaggcctcaccccactaacaaaacaatggatcccgccacaatctcacgctgatttttcttaaagagaaaagaactcaacaacacaccatgacaaagcgaaaggaagagtctactcgttgtaagagacataattgaattggcaggtttcacttgggtggatctgagcttattagattgacccacaagtttgctagcttgacgatgtaatgcttcccattccatgcaaccaaatttaatcctgatccacaaaaaacacgtggaaaataaattacaaggccaaactggtatgtagttgagatttgcacttttcatttttaaatgcaaaacaccatacctattcccacatcatttaacgaaatcaatcaaagcatagcttatagctattgatccaaacaaatactaatgcaaatgtaaatttgagttaaaaagatatcaactactataacataatgcagaaagactctttccaacattgat

SEQ ID NO: 5596 - DNA, 779 bp, Glycine max
caataatatttctgctgctgggaatatgggggtttctattgacaacaatgtccagggaaaggtaaatgcctgcaaactattcgggttttctttgtctggggaaactactacccaaaatttgcagaactctgctaaaaggagctgcacaaaggtgagggatgataacaacaaaattatgttatgatatgcctttttctctctcaagttttacccacctatataacatacactaaatgaaggttcacaagcaaggcagcttagttggaagagctattgatctttcaagactgagtggctacaatgatctgctgagtgaactagagagactgtttagcatggaaggccttctaaaagatcctgataagggatggaagatcctctacactgacagtgagaatgacataatggttgtgggggatgacccatggcagtaagttttcttctttctggactcaaatcaacaccttaaagaatgctgcttttctataccttttaatcagttatcaatgattgtcacctgtctaaacatgttttttttttcccggcaaatgttgattgttagaatgttagttttgttaagagaggggatcgaatccgtgatttttcctccttcccttctctcttaaccatccaactcaccttatatctcctacctgtctcaacatgtactgataggatagaacctcacatctcttttaccctttactatgtaagctatccagtgtcattttatgtgatgtactttctaggtgacactaaaaagatttgcatgtatcctt

SEQ ID NO: 5597 - DNA, 838 bp, Glycine max
gcgacttatggacacgtagaagtgtttcaatctcttcaatatggagaggttctaacttactctgtatcaccaaaattacagagctatactcatccgctaaaccttctaggataacaccaatgtgtcgatgaagtgcgattggctctccaacagaggcgagagcatcagtgagtgctttgacatgaagaagaaattcatgcatcgattttagatcgagagaagtagctggcaactccgttcacaattttccagctttggggtgtgtttgtttgtgaaattattcatgtattttctcccccacttggtaagaatgcacacgcttcccagaactctagagagaatcaatgaggttaacgtcgattggaaccaagtcaagaggacttgatcttgttgctcccaaatggaatacgtaggaatggtaggatttttatgaccgcggcatgattttcctccgtcagaaaccttgctggaattgaaggattcatcacaaaccaatgaagtcaacaaggcttaatcattggctcaacttgttgaccatgacaagaagttagcatcatctaacttttcatagatcggatgaaaagattggggagcggaagaggagggaacataattgattgttgcctccattgatgaccgaactaggctctagatgccttcttaatgtttctaaacatggtaatgagagaaaaaaagatagtgaagattaaaggggaaatggtgaaattaactcaagtgaattgtagaagatagtatttatagacaaatctgttagagaataacagttgtcacataactgtctagcttagctaatcagagtctgcaggcatgacaggct

SEQ ID NO: 5598 - DNA, 839 bp, Glycine max
tttgagaggtttcctagttgatgagggattaatcccatgaacccacttaagctaaggtccaagtatctcagactctccattgagcctaggaagcttggtattggagtaagaacaaaataatttgaactcaagttcaaccgattcaaatattttagttcaagcaaagaaggactaatctctccactcaactccctatagggagagcccacaggtgtgtcaagattgatttccatgacttgaccagtgttgttgcagtgaatccctggccatgtgcagcaatcagatttgtcagaccacaatgaaagcctgtttgaagggtctgctagtccatgcttgaagctgaggagtgcatttctttccttctcactgcaagtcatattgagccttgctgccttgcttgcactgaagtggagagttgtagcagtggacaatatcaagagaagaacatgagttgcaaatagcactgccatgaagaagaaggaagacgaaaaaggttgaatccacaattttctggttcacggttggtatttactactaacaaagcctatataggatatataccatagaagggtttgcatttaaaattttattccactaatggtggtggttgcaaaatgcacacatatgtagaggtatatatgtctacaacgagacatttaggattaaaagtgtctaaccacaccaccattattttgcactagtttattttattttgatttaactactctttttagtcctcatagttgtgataatttttttttagtccctatagtttaagacattcattttggttcctatatttataatttttttaccttttggaccttgcgggaaagatt

SEQ ID NO: 5599 - DNA, 693 bp, Glycine max
atgtccaattccaattccttgtccgaagaggccactgtctcctgtggtacaagaatcgctggactcaatcacgttatcacaacaaccatttctccagaacaacctctaaagatcaagaaaaagagaaacctccctggaaaccctggtaattaattaacttatcatcattcataaactctttggactttcgattataaatatgtatagctcaagagattctagctcagctcagttggttgagcaagtgaattatcgtaaatcttttaatattgtttttaatttttatggataaaaaaattataaatatgtgtatatatgtaacgtatatattatatcccttcagttgatgagttatgagctattcatgtgtgctacttaattaggttaattttctaatttaatttgtgacgcgtttcagacccagatgctgaagtgatagctttatcaccgaagactcttctggctaccaatagatttgtgtgtgagatctgcaacaagggtttccagagagatcagaaccttcagcttcataggagaggacataacctcccgtggaagctgaagcaaaggagcaacaaagaggtgaaaaagaaggcctacgtttgccctgagccttcatgcgttcaccacaacccttcaagggctttgggggacctcacggaattaagaaacactactgcaggcaacgagttg

SEQ ID NO: 5600 - DNA, 784 bp, Glycine max
atcatgatcataatcatcatcattcataaagaatattatacaccagtaaatcaatgcagacaaacaagctgcaatagaagaaaaaatgcaaggtcgggaatttttgagttagctgaaacaaaacatggagcaatgcttttccatctccatgtttatcaataacttgattctacacttttgaaagctatttttttctcagttacatatgaaatgaaaatatcctccagcttcaaaccttcaaactttgcagtgaaaaaatccaatcccagagcccttgcagaaagatatgtccttagatactagtcattggcttcccatggtttaatatagtcaatgctgcaactgcacttggagtgtaatcagcacaagttttcaaattttgttgtagaaggttgagctttattctctctgaaggccatagaagcttgagaatcttttgggctgcaattatttgttcttctccacaaccatcatcatgtaataaatctctgtagtatagagccaaaaacaggtgtcaaacattccaacaaaaatactggctataactgataaattctcagctttctcaaattagtaatacagacgaaataatttgaatttcagccttacttgagcaacaaggctaagttaagtggtttgcaagattgaaagagtgcttcaggaataatggctttgtccaaaagaatattggtaagtgatatatactgtatcttcgctttgtaccaaatataccattctgtcaaaatatgggcacgatatgccacaacacagggtaatcgtgcaa

SEQ ID NO: 5601 - DNA, 721 bp, Glycine max
ttcttatgtttcttctcttttttttcttattccaagaccaatgccatattaatgctgcttaaatcatatacctgcttgtcctagaataaatggtaaactcgattttccttgcctccaaaccttcatgctaaaggtgctaaggaatagtaaagcacccccaaagagcacaccactgcctagtgttgcaggactccgtgaaaataggaatccaataatccctccagttaaaacaaatccacctacaacaaaagataaagatgagatataacatctttaatggggaggggggataattccctaatagaatactgtataaattttctctctgtactaaaataatgtaccacatttccatattattgatgtcatgagtctcaaacaagaggtcacccacaaatactataccctgttcagcacaatgttccattttaaaaactaataggtaaatgtaaaaagtttaataagccataatctgtataacactagactccataaaaccttttctgaggtcaattgtttggacccaaagttcaggtacagatcagttagtggacaataacagagggccaaaggtctggaaaggatactacaggagcaagaaaaagagatcaagaagctagttaattagcaagtgttagtaagttgcttggcactgttgagagatgacccgttagttaaatgtaaaataatttgcaggttggactctaagaggatccccggg

SEQ ID NO: 5602 - DNA, 810 bp, Glycine max
aattggtatgcatagaatataaaatgtttgtttaaattgtaaatttataaaaaagacataaaccctttgtttgtagagaggaatgaaaatgagaaagaaaaagaaaattttgaaatttaaatctgacgaatagtgaaagaaaaataattatttgttaagttaacttttcttcatatttttttttcattttctctctaataaaaaaaaacatgttatacgtattttttttttctcaattttctttcactttgcaaacggacccaaaaaatgggttgccttcttcaggtgtgaacctcctaatgtccgtttttctcttttttttcttgctgcataaacccttcgtgcttccctaatacaagcatcttctgcaactcccaaagcaaaaccttgtgcgacacagcatcagcgcaatgcatcaacaaccatgaatccacgtttcaccactgcacaattacaatcccatgagcctctcgtgcatcctcaaacacaggatcttccctccacccccttcccccttcaccctcttcatccaacggcgatggaagaaacccaccgtctccgcccaaacccgcttagaggacagagtccgagacccccacttggacaaactcatgtcccacctcaaaagactcgaccttgttctcagaatccaccacctcatgtccgcgcgcaagcgcggtcccttcgtctccctcaccctcctctcccgctggcgaaacatcctcggactccacatccccgtggggctcttcctccgcaaatacccccacgtgttcctcgtgttcgtccacccttttagaaaaaacacgt

SEQ ID NO: 5603 - DNA, 811 bp, Glycine max
tttgtaagtttctttttgtccattctagctatcaattatgtgcttaaacttatgcagtcaatgattgaaactttagattttggtatggtttgatggtgagagattcatctaacctggctgacagcttattaagtgtttcttgcatgaatttatctagtccttttttatcttcggacttcattgtagttgtgatggcaatttgaaaaggaattttttatcttcagatttcattgtagttgtgatggcaatttgaaaaggaatgtatattcagtactttgtgatgtccttattgctccaaattttttaaatcttgttttgtactcattcacatatgcatcaatcgttcgtaatggatttgctcgtctgtgtgtgtagagtttgtagacatacacatcaatcgttttttcttctctctcatgttttcttttagttgtctttttataagatgttcaagttgttctcctgttcccaaattagattttaattgcatattaatcactctgcatttcttttgttaatcaatcgaaaaaccaagcaatggctatatctgttcttagataatattagattctctttgatcatatagatttctgttggaaatttgttagcaatttgagttaggatgtatatgtttactcgtgttccacctcaccttttctgttgattttacactggtcttactagtaaaagaaaataattctacatctcatgttttaagcatttgaacaggaaatatacttgcaggaagttttatcaatgcattttcttgattgataagtataaaaacttcttttgattaaaaagataaatt

SEQ ID NO: 5604 - DNA, 704 bp, Glycine max
gcctgcagggaatcgttgaagaatccaaatccagtattcatgttggtggttgaattagagtggaaaacaaagttatcaggaatatggtcaaggtttctccactgagactcagcggagctgctagtgctgcaactacttccacaactaagagtactattattattattattatgactggagttaccaagagagactttggtcagggctctccacgctaaggtagttgtgaacatgatggtgggtggaagaagaagggtagttgtgattgtgagtgataacctcataaaatgatctctgggtgtcttggagagctaaggaatcatggaacatactgtagttctcctctgtgttgtcttccatgagcatttgtttaatgtagccaaggacagcggagacatcactctcatcttctttactaatattgatggaggagactcttatccatcttacaaggaggaataataagaattcattcttggggtatgtatgcatatattatattaacgatttcataccaaaattgttgtttaagaagaggaaaacaagtttttgggaatctaaaatttttaaattaaagccatggactgtgtggatgaaatagaattgaaaaagtttgcataccaaagcaaggaaggagcagtagcacgacaggaggtggctgagatctctgaaattatataactcgatgcaactccaaattcaac

SEQ ID NO: 5605 - DNA, 796 bp, Glycine max
aatatacggtcattcaactacagctcaagacaaccgttttttctttgaagtgaaaaaccaaaatttaatgactcagtaggaaatttttctgaatgccattgataattgcatatatttatttttaggaaacttatcagcaacgtttatctaaaattttgtaacaaataatttagagaaaatatcacatacatataaatatgaaaacacaaagaaagataattgcaaaataaacacaaagcctcgttaacagcaaggtggtggtgtctatcaagaaaacaaagttacatcccctcccctgtttgcacaggtttgaccaatacaccgaattactaaaattgatatgaaggaacactaggaaaaacaaaaagcaaaattccaaacgattattattctgggaagagtcgaagcacaatactcattaacaagaaaattcggttgtacccataaaataccgattcctacccgcacttagattgatcagtacttgtagtcctcaacatggaggctctctgaggcaccatcagcaagctttgagttacccttgtaggttcccagagttgcctctgagttggccttggctcttaccaaaagggcttcctgagccttcttcacattctcctcttttccactccatgccttaagggtgctctgttgaagtgcccttccaaaggagaaagagagtgaccatggcttctttccattgacctggttaatggcattgaggttaacggatgcctcctcctcactctgcccaccagacaagaaaacgatagcaggagctgcaggcatacaggtt

SEQ ID NO: 5606 - DNA, 718 bp, Glycine max
cgcttactgatccacagtctcgttttgagatagggtttagtctgcccacggtaaaacttctctcaaaagtaaccactttgatattttagcatttctttttagtgtgtgtaaacatattttgcttatgcttggtatttttccctttgtagttatgtgcaaaatatccttacacggatcaattttatggcctcttctcagcttatgcacctcaaatttcggtttgtattttactccagcaagcttcttaatccatataagccataccatgctcttgagatgcttttttgcctttagttatcatttggtgatctagtgcaaatctttctctatttaccaaatcatctatgtaacatctgtaacaatttagggacgtataatgctgccacttaacatgtcatctgatgatggaccaatttacgtaaatgctaagcagtaccatggaatcattagacgtcggcagtcccgtgccaaagctgtacttgatcacaaattgactaaacgtcgcaaggtatgattcctcatatgggggtatcccaaatattttttcatctttatattaatgaacattatatggtctcagcttcactggccttgaaaaaaagtagttatgatagggtggtctggcctaacttttgtagaaagtgatagattatctctttcaagcaacgtgcactatatatacccaagacaatatgtagtatatttgtgtgagctgcac

SEQ ID NO: 5607 - DNA, 766 bp, Glycine max
cagctcgtctgcctgcagatgcaatagattgagctaactcagacttcaacaaaagatactttttccaaattttaacccaaaactctagttaaagcaattgacttgataaaattggagaattctcaagaaatttgttaccaataactatgatatgaagaatattactggttgagaaaatatatttttgggttaacagtcagcagattaatgataccaaaataggaaaactgtggcttaacaattctattattttgcatcaagtgccctctattcctgaaactctatgaaataatacattacccagtacattgtaccttctcacaacatttccaaaaacctaaagttgcttgaaccgctccaacattttcagccaaaccagcaatttcctactaaacattcaacaattctaataaatacggatatgttgtaaatctctagaataaagaaatccttttaaaaacaatgcaacaaagtttccatcacccagttttccaatttgaaatatgagtactgttaatacttcagcatgagtcaaaattactcagactaataagctctatcattcatgggtaagcgccattaaaataacaaaataaggtttcagtcttcaatactagagaccgagctaatagaaaataaaaaagaagctccttcatattaccttagacgtgtataaagtatattgaattgcatggcaagcatcttgctacttgattcacctgtggctttatattaactgccacaaggcaaaaaaaaatcaagcact

SEQ ID NO: 5608 - DNA, 787 bp, Glycine max
atgcaacagattgagctaactcagacttgaacaaaacaatttacttttatcaaattttcagccaaaactccagttaaagcaattgactagttgataaaattggagaagtctcatgaaatttgttaacaatgttatgttttggttaaattggagaagtcttgtgaaattctgttaccaataactatgatataaagaatattactggttgacaaaatatattgttgggttaacagccagcagattgatgatacgaaaattggaaaactgtggcctaagaataatatcattttgcatcaagtgctgtctattcctgaaactctgaaataattcattaccctgtacattgtaccttctcacaacatttccaaaatcctaaagttgcctgaacccctccaacatttcagccaaaccagcaatttcctactaaacattcaaaaattctaatatatacggatatgttataaacctctagaataaagaactccttttaaaagcaatgtaacaaagtttccatcacccagttttccaatttgaaatatgactactgttaatacttcagcatgagtcaaagcaattactcgactaataagctctatcatttatcggtaagtgccattaaaataacaaaataaggttgaaaatcaaaaagaagcttcttcatattaccttagacatgtataaagtatattgaattgcatggcaagcatcatgctacttgatgcacctgtggctttatattaactgccacaaggcaaacataaatcaagacgtgtgcatgcagcaggca

SEQ ID NO: 5609 - DNA, 629 bp, Glycine max
agtgcttgatttttttttgccttgtggcagttaatataaagccacaggtgcatcaagtagcaagatgcttgccatgcaattcaatatactttatacatgtctaaggtaatatgaagaagcttctttttgattttcaaccttattttgttattttaatggcacttaccgataaatgatagagcttattagtcgagtaattgctttgactcatgctgaagtattaacagtagtcatatttcaaattggaaaactgggtgatggaaactttgttacattgcttttaaaaggagttctttattctagaggtttataacatatccgtatatattagaatttttgaatgtttagtaggaaattgctggtttggctgaaatgttggaggggttcaggcaactttaggattttggaaatgttgtgagaaggtacaatgtacagggtaatgaattatttcagagtttcaggaatagacagcacttgatgcaaaatgatattattcttaggccacagttttccaattttcgtatcatcaatctgctggctgttaacccaacaatatattttgtcaaccagtaatattctttatatcatagttattggtaacagaatttcacaagacttctccaatttaa

SEQ ID NO: 5610 - DNA, 698 bp, Glycine max
tgcttgatttttttttgccttgtggcagttaatataaagccacaggtgaatcaagtagcaagatgcttgccatgcaattcaatatactttatacacgtctaaggtaatatgaaggagcttcttttttattttctattagctcggtctctagtattgaagactgaaaccttattttgttattttaatggcgcttacccatgaatgatagagcttattagtctgagtaattttgactcatgctgaagtattaacagtactcatatttcaaattggaaaactgggtgatggaaactttgttgcattgtttttaaaaggatttctttattctagagatttacaacatatccgtatttattagaattgttgaatgtttagtaggaaattgctggtttggctgaaaatgttggagcggttcaagcaactttaggtttttggaaatgttgtgagaaggtacaatgtactgggtaatgtattatttcatagagtttcaagaatagagggcacttgatgcaaaataatagaattgttaagccacagttttcctattttggtatcattaatctgctgactggtaacccaaaaatatattttctcaaccaataatattgttcatatcataggtacttggaaccaatttcttgaaaatctccaattttataagtcaatgcttaaccagaggtttgggtaaaattgaaaaa

SEQ ID NO: 5611 - DNA, 700 bp, Glycine max
cttgcatgcctgcagcaacttcatctttgtcatcaggaagtggattctctctttttagcacaccatcttctgctccatcgtcttctatgttgtcatctttgtttacaacaccaactcctgctccaggacctcaaacctcactttttggttctacatctgtacctggttctgcatcaactccctctctgtttggtaatactactccattgtttagtacaactccagctacaaattcactcttttcaagtccatttgtttcaggtactgtcttgttttatagttcttcatagtcatcttactttcaagtattaacagactacgtagttgttttagatcgaaaattgttttggaaatgccaatttcatttttgagggctgatgttggacaactgaacacatagggcttaaaagatcaaaattagggtttattgggagaattaaagaaagaaaggtgaacggagaggtttaagatttttaaagttttaactgaggttgaatcaaaattcaaggggatgctcaatatacatatacattattgacaacccttcttccttcccccaaacaatatgtatgaaaaataaaatatacgtatgggaaatattataaagaaaatcatggaaaaatggtgaaatggattttctaatataaataaaaaaattatcccctatgaaaggtatattattctagaactcaaatatttt

SEQ ID NO: 5612 - DNA, 759 bp, Glycine max
gtttcagagacgataacaaacatgacttagtaaaaggaaaaataattttatcaatgacatgacttaaacatcaaacttaataccattgcataatacagtacgaatatgccaatcccatcactcaaaacactttgtaaaccctaaatatggagtatccaagtaggcttctcgcatttaatcatttgagtttggaggttaatttatactcagttctgttgcagtttttgctttatttccgcttggtgacggactttatcatttcttaccatctccccactctgcaacccttttttctctacttttaaagatataaaaaccaaaaagaataaatcagctcctcattatgtaagtgccatagctagtgtaaagcaaaccttagatatcatttcacttaaacaaagtagtttaagcagaagactaaaagttaaagaagatatggcccaaacaaaaagaaattgtacttaataatcttccctagctcatcataatcatattttcctaaccagcatatatggcaaacctacacattgtcaggtatagagtttaataaaatgtgataattatacccataacagaacattataaaaggaacatcaagatgaccaaattgggtggaaaacaatatacctttgttggcgaagtttttcagccacaggatctaatggttcttcctttattggttctactgtcttacccttcttttcagtggctttatcagaagattttttgggagccttttcagtagtttttacagcaggt

SEQ ID NO: 5613 - DNA, 739 bp, Glycine max
tctatctggagtgcagaaatagcacctgatacatgctcatcagtggaacatatattgcatttgaaacctatagaggtacccatatattatactctctccgtctctaattataagacataattaactaatttatgtttattaagaaagttagttaatttaattattagcattaaaattttctataattataatattttttcaaatttatccttaattttattgagaatcttttcatcttcttcaatctccataagagagagcaagagataattcaggatattttattaaagaatagagatgaaataaagtcttataataagggaaaaaaaattgttaactatgtcttatatggttgtcttggtttatctttgacattaagtaaattgcctgtggtttcattgcaaacactgccgaaagttgcggtcagttgaaaaacctttacgttgcagctgcaattgtggttgcagaccacagttaaaacgatgttaagtagtatcttgctatattttgtatagttcacccatatatcattctgttccttctctttggaaggtagatatcttccgaggaatcactcctcccgatgttccaaaatttgggaaggtatttggtggacaaatagttggacaggtaagaaaaactaagttgtcttcatagcacagcatgttctcatgtcagtagcactttctaggcaatgattgcttacatgataatgtgtaatatacattctacaggcact

SEQ ID NO: 5614 - DNA, 844 bp, Glycine max
agttagagaaggttaattttagagaaagttccagttcttcacaatgtttcagttaatttacgcaggtaactccagactctgaggaacatgtcttgttctctaggttttaggagtctttgtattcactcatttggtcatatactcagaataagaggagaggattctgcttcctgggatgtggaatattagcattttgcttctgtccaaaatagtgatgttttgggcacattctcttgagaaaacttaaattataatttttttaacatcacttaattataattataaagcaaaagcagcaaaaagaaaggaataggtgaagggaaacaccctaaatagcatacttgcaacatcatatgcgatgacgtacagcaacagatgagtccctaatgtagcttggaataagacttctaaatctttcctgtccagctgtgtccctgttgccacacatcacagacatggaaaaaaataaaggttttgtgggggaaaagattaaaaacaaaatattaaatgatgaaggaatcctgcctaaaagttgcaattagacaaaacaaacttcatggacctcactctgattaaccaatacacagcaattttttacacttgaagtaataaagctaaacaagatacaaatagtaattgatattagaattctttaaaataaaattaactgactgagagaattcctatcagcccctaagaatttatatttaaatctgattgcaagtcaaatcctaattaaaagataactcctgaattataggataagggaatcccttcccttttcgcccctaataccattattttcatttctgatagaatttccaacatgcgacatcttaccaca

SEQ ID NO: 5615 - DNA, 774 bp, Glycine max
atctttgatgtactgcttcattttgaaatcctcttgacaaaaagaattccaaaaggcttggcaattggaagggagcgaccttttttcttgtgtgggcttataacattcagaatggcatgtttattaagtatcctacatattatatacccctctaaaaaaatcctattcagtgtagctcagaggatttggaaaattttgatgaaggaccttctgtcagaatagcatattctaggggaaaactgggggtggcaacagcatcatttattcgctaaccatccaatcagtccatgaataaattcaaccaatcccctcaatcatttcacaactcccaatggtgctgatttgttggggcttgggaatgtcaaatgcaaattttcaaacgttaattcaagtgtgtgacgataatttctaagggagatgaatagtgactaattaattggggtatccatgaagtcttcagagaggttattcaccaccactataaatagatgtcattgagatgaggagattcatcccaacctgaagaggggtcatttacccaagcagaagagatgtgagagggactattgttgtgagggagtgtttatcattcattgtaattttttagagacatgggcttgtaggctgaaacattattttgggagggttttctagtttgttcagaaatcttgtgtattatttgtgatgttgaatattttgttggagtgtttgtgagcattgccaagaggtcccaaaccatatcgtgtgtgtttttccccccaacatggcatgggt

SEQ ID NO: 5616 - DNA, 695 bp, Glycine max
tttaattaattagaatgaaaaatccttctcaaacttcgatcactgccttttgagattatgtgtagggacattttgccgatgagatcttcttagaacagaatgattaaaatttttgaaatcaaaggcaaaggcagagatagatagataacaacgcatatgctttttgttgagattatacttatctctagcctcttgttcttccttcccatcttcttcctcttttttttttttcttcttctttttcttttatcactcttttcttttgaaaagttgatgccaacatatagattccagtgaattaaaagcaagatcatgacaaatgccatatgtcacattacagtaacactgggcggttgatactctgtctttttaacttccaacagaattttatatattgtgcatttaattttgattttgatagaatcgacttcaattaatttcaataaaaaaatgattttgtactacataaaaagaattatgttgagatgtattcttgtgaaattaatttaacaagaaattatagatttaaatatgtttttaatttttatatcattatttttatgtagtcattttaaaatagttcttgtaaactgtaatatatatatgaagtgttggcaaatttggagtggacaaacctcttaattatgtaagcgattgccgattacagtgattctactcttgtggttgatcccatt

SEQ ID NO: 5617 - DNA, 809 bp, Glycine max
aactgtcaaatgctcttcaacgttgtctcttgggtggtaaaagtggagcaggtctattttcccctagagtgaagattatgcttactaccatatgctttccttccatgttcttgcctctttttaatatagctgttgagctcttatttttttccctcaggtgctagaattggcctctcctcgcttattgtcgttgaaggaaaaatttgttgggatctttacattgatgggcttcttgttaattcagatggaaatttgttggatgctctaatagaataatatactataaaaagctagaaaagatgataatgatggattcctggctaaaataattagcgtttcagagatcatgcttttttgttgatgtcaattttcaatgttgtttacttttcaagttttctttttcatttaacctgagtttagctattgatgttacatacatgccatttggactctttgaaatatgtaatctatgacttcaaggaaatggttagaagttattcatactttcattaagctaaaattaaaaatatccttttactagctgttttctttaatctttataataagattatcctcccaaacgaatctgcaatcagtttcgtggaggttttccacatggatttccttaataccatgatgttgagaaaccgagaaacctatttccagaattaactggaaaaccccaatgcagctaataactgttgttcttttaggctgctttgagcaatacgggtattccaagagtccaagttgctgctggaacatcaaatgatgagcaaccagaagttgacgtaagcaacgaggagttt

SEQ ID NO: 5618 - DNA, 828 bp, Glycine max
gagaatgcaaagatgtaaatgaaaaagaggtaataattttttggcaatttacaacgacgtgatctgaagactaatattctaagataaagatcatgtttatgagggggaagggcatggaatttagctttccatgcctgggtaaataattctataaattcctgtaaattgtagacattctttttctctctctttcctaatttttttcacattcatattctatcctgtaaattggagagtctcctctatggtagggatccgcaatcagtcatggaaaagaacagtagcaactagagagattaaagcagttgatggcatttatgccaaaatccaatcctaataacactcacaccatcctccctctattcttaaacaagatagtactcatcacccgcagaccaattcacgaagatataaatgaacttattgatgagcttcagaacatccaaaaaaaggaggttagcaacataccattcaggcattcacattgctgaacatgcagcattatccaactcaaaaattataaagataaaaaaaaagcacactccctagagacatgaatttttccacagacacacgcattcaagtccaaccagaaaattttcaaaccatccaaaactagcattctctaaaacatacactaaaaaaccaaacaaatcaagggtgaaaaagaagaacacaaactaaccaatcccgggattctctttgagcccgcacttcaatcccaacggtccctgccaccctccatcagcaacctcctccccttcatgaagcacactgaccttaacatccccatttccctcctccccctccttttcctcattcacagga

SEQ ID NO: 5619 - DNA, 690 bp, Glycine max
tgcctgcagcataaacttgtaagggaacatctctataatggaaatagcattgcaccagggttatttttgttttaactaattgagggatctttaaataatagaggttatgattttgtttgaattgtgcggtgcactttgtttatctgaaaatttgacaatttctgatcaatatttaggtatatttaccatcacttattgggtcatgaagttgaggttcaaatggtgcgtaatgccctgcctcgtcgctttggtgcacccgggcttccagagctgaatgcatctcaagtatgctgttgtttcttcagatatatgttaattgatttgtgattttcgtgctaatatgtttgatattggtctgttttttcctgctatattccgtggcagttagcagattatctgctgctttagggagtatgctttaggaggtgggagagaacattttgtgagggggggattgtaatcgaaatatatgatactgtctttgcctttacttggatgttcgaattggatgaggaaacagtgctttaaataaaagaaagagaaaattgtataattcaattatttttttctctaataaactattatgttaacattgtatatttgtattttaacaatgtttttgttaaagatatattttgactctaagattaaaaacctgaataaaactggagaaatgccttgtaaccttac

SEQ ID NO: 5620 - DNA, 652 bp, Glycine max
atgttacggtcttaccagttccaggtggtccttgaatcaaactaataggcctctgaagcacactcttgacagcaaaaacctgcaagcataggtgatcagtgaacagaagattattttataatgttgcatctcatacaaaatgatacagtaaggttacaaggcatttctccagttttattcaggtttttaatcctagagtcaaaatatatctttaacaaaaacattgttaaaatacaaatatacaatgttaacataatagtttattagagaaaaaaataattgaattatacaattttctctttcttttatttaaagcactgtttcctcatccaattcgaacatccaagtaaaggcaaagacagtatcatatatttcgattacaatccccccctcacaaaatgttctctcccacctcctaaagcatactccctaaagcagcagataatctgctaactgccacggaatatagcaggaaaaaacagaccaatatcaaacatattagcacgaaaatcacaaatcaattaacatatatctgaagaaacaacagcatacttgagatgcattcagctctggaagcccgggtgcaccaaagcgacgaggcagggcattacgcaccatttgaacctcaacttcatgacccaataagtgatgg

SEQ ID NO: 5621 - DNA, 653 bp, Glycine max
attaacagaagcacattagctccatccaaaagcacacaacaacgatattatcctcttctaaacactttcattaacttcatcatggctatcaatccactctcgttaccaaaactccaaattaactcgcaacaaaatttcatctcagtgaaaaaaaaagcatgtgaattccatagtacattaggaataatgtaaaatggtgattatttgattgagtgtaattggattggatcgagggtgaaaaaaaataacttggaaaaacgcaaattttggatggggttctagctctaaaacaaaaaggagtttttcaacctagtcagtgcctaaatgcccgcgaagtcaatacttaagcgcttaccacatccatcaatctaccctcatgcattaacaatatcgtaacattaccaaaactactaaactaacttgcaaccaaacttcagctcaagaaagcaaaactataggaattatgtaacaaaatattttgagaagaaaaaaaattaaagacaataactagctaatgtgctaaaataaaccgttaaaaataacaagccctcctattctagaataataattgtttgaagcccaaaaaattaattaaaaagaaagaaaattgaaagggacgatgcctataaagaattaaatactttgtagacgaa

SEQ ID NO: 5622 - DNA, 685 bp, Glycine max
accgtcgtatcgggaatcagccgccgttccgccaggatcgcctactgcggcctcttcgccttctctctcgtcgtcgcctggatcctccgtgaggtcgccgctcccctcatggaatcccttccctgtaagcaacaacaacaacaacatcatcatcatcatcatccctaatttcctttttcaatttcaatttcatcttctatctcaatctcgtcaatttcgtctacaaagtatttaattctttatatgcatcgtccctttctattttctctctttttaattaatttttttggcttcaaacaattattattctagaataggagggcttgttatttttaacggtttattttagcacattagctagttattgtctttaattttttttcttctcaaaatattttgttacataattcctatagttttgctttcttgagctgaagtttggttgcaagttagtttagtagttttggtaatgttacgatattgttaatgcatgagggtagattgatggatgtggtaagcgcttaagtattgacttcgcgggcatttaggcactgactaggttgaaaaactcctttttgttttagagctagaaccccatccaaaattttgcgttttttcaagttattttttttcaccctcgatccattccaattacactcaatcaaataatcaccattttacattt

SEQ ID NO: 5623 - DNA, 808 bp, Glycine max
ttttgctttgattgttatttataattattgactagctacatatcgttgaaggtgaaaaaataattataacaatgaagtaatattagaaagtggtagtgttgagtgtgaggatggtcccaatgtgtgagaggagggaccaaggaaatattagtagggtgctgtatcgctggttggtgagagagaaaaagaccgaggataagacattgacattactcactaatttcatgtttgttacactgattcctttatctacaaggttcgagcatgatacattgcttaaaagatcaaatctagatcacttgttagttatattgatttttcttttatattcttatataattaacttagttaagtcatgatttaattatagctattaaagtgtatactatgttggtttattttgttagttgttaaataaataaataaaattaaaagtataaaatgaattttttttaaaaatgtcgaattgaataaaaataaactttagtttgtttcagatttaatattatattcaatcaaattaaaatgaatcacatgttatttttatgtatagttgcagtatttttttattaaaaaattaaaccaaattacatcacaataatccctactctcgagtcaaatgctccgcaaccaccaaaccaaaccatgattctttgtcgtgatctatcaattcatacatccttcgttgaccatgcattgcaattgaagtattgcgatcggttgttatggtgtcgaattttatttatttatttttaacgtaattgtcatgcaaattaataatcacatatattttagtagacacagactt

SEQ ID NO: 5624 - DNA, 776 bp, Glycine max
atcttgttgaactctttcattacttagtagatagcctttatctacctaggatattagttatcatcatcgaaaggcatgacaaattttttatatatatgtatagaaaaaggatgattattcttaaatatggcttttgcaagtgattgcttgctctcgtgatgatatgtgggacatttaaccattttcaagctgttgaacggcactggttggttaacattttttgttgcaaaacttatctatcggatatttattcaacagcacaattggtcggaggttggaaaaagagatgaaatacaagtatcttgatgctgatgattttcattctgaatcaaacaaaggtgtgtatatatatgagtatacacaattgcacatatttcaatgcatatttggctgatagaacaggaaggcacgttgattaaccctcgataaggaacttgtttctatctgtttttcattctttcttttcttttcttttctttttttactttgttttcatctcacttcttccaatacaacagaaaagatgcgaatgggaatcccactggcacttacggatgaagaccgaatgtcgggcttgaatcactatgtgataccataaacgaatacttaattaacaaaaagggtctgattcttggtcgttctgctttgaggaatcaatatagagaaatgcttagatcagtgaccctggttatgaatgggggacttatgcaagtggtgttaacttcattctcttggatgctcctgctggagtgcttagtgttcaagtaaataagaga

SEQ ID NO: 5625 - DNA, 775 bp, Glycine max
agagtcgacctgcagattgatttgtattccttcttttctttagtcacaaatgaaagaataaagaaaagacctgaacaagaaatgatgtgattagtgtgctaagtgcttcaattggaccagcagcaatttactgataactagcatgtttggttccacacatttcagatgtttttcatgtttactaataaactaatagttataggctatttcatgaatataactaatagctttcactattttatgaatatatttatagcttccactataatttaatggttatgaatataagctaatagcctccacgtctcagatgtgactttttacttcacaacaagtttccaaacacactagtacaacaactttcgctactgatctatctagaacacgggaaaagaacacgaataatagcataattgagtgctttccctgtacatgaccattaggatattcatcacttgagtttgaaaagagtctttgaagttagtagtacctgtataagtggaatttgaagcctcagaagcagtgtcaagtttactgaggaatctcttgcgagttaaagaaatagttttcatgcgtgagttgatggcttttaactcgtgtgcaatccgataatgagctttcatattcctgatactgagataattagagagtccatttgtatggttatgtagctgaaccagttccaattcatcaagaagatcttctgcctcatgaacaacatctctgacttgcctaacccaaactttgagttcctcatcactctcttcaaatgcat

SEQ ID NO: 5626 - DNA, 745 bp, Glycine max
aggaaatgttcgggaaactaaacaaaaatataatgaaataattctaataattgaaagaaattttgtttaaggatgctaacctttagaagcaaaccattgcaagctttctttttgatggcctcagctattctcttaggatttgtaactaacaaatcatctacaagttgaatatcaactgaagcaagcaatgaagcccatgaacccaaatcatcttgatcaaacggatccttaattgacacaatgggaaattctttaacataatttttatatagttgaccaagactctgagtagagtgaacatgagctccatcatttggctgtttcatgaagttcaaatcatacttcccatccttagtgtaaaactctgaagctgcaacatccataccaattttaatctgcaccattgttttttatttccagatcagcacaagtgaatattcaaattatgcaacagaaataatcaaaacttcacccaccttgccagtataaccagccttctcaatggcatccacgagtaaaacaaacccctccctgttatcttgaacactgggagcaaatcctccttcatctccaacattacatgcatcttgtccatattttgccttgattatttgttatgaactgaaaatcagctcaatgtttcctagcattcgaggtctaggaccctcccaagaagaaagaaagagaagaaggaaactctaatatttttctctgctaccttcatcacgatacatcattcattctt

SEQ ID NO: 5627 - DNA, 711 bp, Glycine max
aacaaatttcagtttattttttttcattttagattttcaaactggaataagtgatgttttctccatcttattaaaagtctaaaataaaacataggctgaaaaattcctacaagttacaatcacaatctgtattttatttttctttcaaactattatgcagatgaaactgaattgattattacatgttccatcaacttccaaccttaggtttgataccaaacttttttttttttttaattccttttatagaggttttacatgcttcccgtattcaagctactacattatttaactagttagttaacaccacaaaatatgtggttaacaaataatttctgtctttatccctagattttggaattgaactgttagaataaacctataatgaatcaatatcaatgaaagaaaatgcacaaaacttcccgtttcatgtacaagtgatgtccactcaggaggaaaataaataaataagaccaatgaacaaacaggtttttgataactccttggctccttgttcataccttttgaagagagaacacgttgctggtggtgcccactgttgaggatttgaacattaaactgtttaggtatagtgtctatcgtagggattttgtagttccaagtgccatcttgtaacaccaaaccatcaagatttgtttcgtattcttcaagcatgaaaaaccctaacccctggacaaaagctccttcaat

SEQ ID NO: 5628 - DNA, 790 bp, Glycine max
actggaagttgggttatgtgcatctaacatttcatcatacaagctcaacagtcagcactttaggtgctgcttattttgggtgggggaatcacgagtgttgactggttggatatgttagtttgtactctctgcttatgggggttggacattttgattgaatttggtcattatggtctcatggtgtgagttccctttgttggagtcaaaaatcaagttttttaaatacctgatgtactaagttctttgttgattaccttctgttttctgattgcttaataagtgccttgattaccttttgttcttctagatgtaaattttttcataactattcttatttcctgtgtaattagcattttccaaagttttaatgtttttaaaattatgtgcctataacacaaacaaaataactctatgtcactgtttttgtgaatgaggcagaagggtgatgcaatgaggcagtcttttgatccttcatctttgggtaaatctctgaattcttttattttgttttccttattaacttgttactatgttgaattaactgtaactcttttatcaccaataggtccttccaagattccatctataaaaatacctggaaaagcagggaatggtgcatgggaggctttgtctggatctgattcctaccatgcttcgtcggatgctagcctcttttctagctcattacctgttcttccgcatgaaaaatgtatgtgatggttatttccttacagttctgtcatttgcattgtccatttttttataaattctgttgatttggttttgctaa

SEQ ID NO: 5629 - DNA, 742 bp, Glycine max
gcgatatgattcctttttctccagctaaatgataattaccttctttacagcattgatccaattcacatagatgatcctctttttccaacaaataatgtgggaaggaattgcttccgaatacatcaatgtattaaggtattgattaccaacatgttttccatatttcagttctcatacttggcctttgctatgccatgatgacaggaaaaagaaacctgtggttgatattatccacaagctgttaaactatctgtaattcaaaccaataaaaaagaaaatctttcgtttaattttggcagtaaagcagcttctaatgtctttattaactgatcaaggtgtctataactttttatgcaataatgtgcctgaaattcctgtgaatgaaaaatctactttgaataacaatgtggcatgtgtcagcttgatattttgagaggaaatgtgttcttgaaagttgtagaggatggacaaattttgttggaagtctggcaagccttgttaacttactgttagaatttaggcttaggacctaattcaaccccagaaaactgaattgtaaggtgaggattatccaagctttataagctttatttaagccacattccttgtcatgtgggactaaacacaccctcaatgctggaattaaggcagcccaaagatgccacaactaaggtgctctatgggtgacagcaattaaggtggttttccaacacttatagcataattgactctaaaagattaa

SEQ ID NO: 5630 - DNA, 821 bp, Glycine max
gcatgcctgcagggataaaatcaaattaaccgcatcccataattgttctgtttccattggtttcccaactgtctcaaatggcaagtttgataacaaaatggctgcctgaaaataaaatgatatgaacatgttaaacaaattgtattcatataacatgattcaagaaactattagcttagctttgaatatgatttaaaagttttatcattatctatttaattttagacttaaatatgtttttatccttaataaatttttgaatttgattttttgtccttaataattttttaaaacttggctcctaattagttttttactttgttttcagtcccctaatttgtttagacaacgccttagaaagtgaaataaagtgattttgatagctctttagggaccaaaataaactaaaataaaatattagccatcaaaaagtaaaaatgaaataaatattagtatccaaaattaaatttaaaaaatttattagaggcaaaaaaacatatttttaagttttaattttatttcagcatatatatcactatcattaagtttcaaacggaaacttctcacctgtctaagaacttcatttctttatttcctttccaaaattataggttatcttaaactttaatcaaaatagtggaatatatgattcttttatatcacaaagaattgacattcccaatgcataattctaacaaagaacgtatttttaagaaagcaaaagatatttttgtttcttaattgaacatatgtgtacacattcatatttgagattatattgaagtttatggcaaatccattcatcatcaccttcaaacctt

SEQ ID NO: 5631 - DNA, 714 bp, Glycine max
aagcgaaaaaccatcagttaagctagttgatcaaagagattaacgcacctgttctagtatgtctactctcacgtaccctgactctcagcaaattgcaaatttaaatgaaaattttgtggacctaatgtcttctaaaatacaaattacatgtaggcttcagtaagttttgtcataggagaggagtatttcgaaatttgaacaaattctgcaattgaactaggttccatctgattatgtaaaggatataggaacatatataaatgatctttagttgcattttcatggacaaaattaccttcaactctttgctgagaatcactctgggcttacaaacacaagaaaatgcttctccaaatattcagttattagtattaaaggaagcaagcttattgataagcttaacgtttgtcatcacacatcatccacttttatctgtgcttcaatatcaaaatcctttctaattggaaaaaagaataccccagccccctaaagttgatattcttggaaaggaaaaagaaagttcaagttgtgacagtaaatcgtcctttcgtgcatttagttggatttttgttgaagatgcagaaaagggaagagcaggaccgatcatgcaatgaatagactttgatctaccgatgaataatctgctgaatcataaaagtggctagggacttcagcagtaagccttggatcataatactctgacatatctatatt

SEQ ID NO: 5632 - DNA, 829 bp, Glycine max
atctttgcttgatgttcctgttgaaagagattgaagagagaaattgtgttaggctacttatgtgttgtggaatttacgcattgatttataatcaacgatagttgtctaatctagctgaataatcggtaaacgagcatctaatatattcaatgaaatgaagattgctatgtgtaacataaatggtaatattttaacgaccctggcccctctgaagctgaagctactacgttcttctccactttgatacaaatacacccaaccaaactgcggcagacatgaccaaactaatggaacatatccataactcagcaaccatgcatgaataagaccaaatagacataatacaaacagcaacagaacataatatttacaagtccaaacagcagcagatccacagagaggataagccaccatgaatagaccatcaaacagctgcttggagttgtacaaatacaggaaaagggctggtatccatctttgtcaaaggtggtgaaaagttgggacaaacgccatcagatggtgtgcacatggatgttaccccattttttctctaatgtattcgttcttaatcatatcatgtctagcatgtccacttatctccgctacaatgaatttattctcttattgcctttttattacccaatattatacaacattgcaagtcttatagttgtgtcgcaaaagattacaagcatacataagaaaaaaggtacaaatgcttatgtaaattcatttccattgagtctcaactaaagttgagggtttgcttaacatgtgttagggttctaagaccaggcatgttgcaccatatggacaagaacaacacatt

SEQ ID NO: 5633 - DNA, 879 bp, Glycine max
  misc_feature (864)..(864): n is a, c, g, or t
  misc_feature (873)..(873): n is a, c, g, or t
atagtcaaaaattcaaattcgtcaacttcggtctggctgcttgtttgaccagaagacctgacagtaatattcatgtgatgcggtgatctaactggtactattgaatctactgaggacattgttaaatccatattggaagaaactgtgcttccattgttatgcaaaaggccacctcttggatgctctatttgctgtccacataagctgtattcatctgaatctgaacatccttccatcatagactcaagccgaacgaatgtgaaaaggttctcaaagagttttttctcaaaatcatcatctttcttgtgcagatctttatagccataccgtgccacacatcgaaagatgtggaaattcttaggtccaatcctcttgacaaggaatcgctctgcttctgggactgtgtagacaggaaggtacttcacacatacaaaaacaactacagaatggatggctggtaggttggtgatgaaatgagaaaaaatgtggggtactccacttgcaagttctgtgtagaccagtccaattccggggacacgaacaagtcctaaacttgggccaagaccaagaatccatgccattgagaccttactatgcatttcaaactcataccgtttcacggtgccgtaatgccaaacagacataataataagaaatgctccagcaatggcaagtggtacccacccaccttgatcaactttgaagagtactgaggagaagtatgtgcattccacaatcaatgataagccagtgaagacgaggacgagaatccaatggcagcgccacactagtatcatgattaaaatcataaggatcgttgtaaccagcatgactataacaactgcaggtcgatccagagggatnccccgggtnaccgag

SEQ ID NO: 5634 - DNA, 740 bp, Glycine max
atagaaacaaccgcaagcactactacaaattcatcattcagcgtcgtcaaatttacatctgttattgaaaaaccgatatagtaaaacatgcagtgacaagtgacatttttgtaatttaaaccaattttttaaaagtattagcgcggtttttatcaaattatctttgatttgaatgttattaaagcggttttacaaaaaatggtctttgtttgtaagctaactactacgattttagctagcaccgtctttgaattcattatattttaattccattatttttcattttctaagctgatatacgacttcttgcattcactttcagtttcactccttagcctggttataggagctagggtttatcgaggctttcgattcgttccttcctcgctgctacaacaatggcgaaacctgggttaggtcgtcgctctccctccggttccgtttccggctcctcttccccctccgactcccgttcctcctctcgctccggctccctttctcggtcccgttctccctcgcgctccatatcgtcttccccctcctcctcctcttcctcccgaagctcccgcagccgcagccctcccccgcagaggcgccgaaggtaccgctaatttagagattgatgaaacatttcattgctattttagagattgcgccttattgaaatattttagtcccgcagagtatagatattgcgccgaaggtatcgctattttagagattgcgccgaagctcccgca

SEQ ID NO: 5635 - DNA, 721 bp, Glycine max
ataatagtgtgttgcacttgcacaggtttattttgttttattttttaaaaggtgtgttttggagcgcgagaattgcaaatgtgcaatgcctccttatttgcctcttcggtgggagagtacgggagaacaatggtggtatgcatctcccattgattgcgccgccgcgaatggccactatgatctggtggtggagcttctccatctggacgctaacctcctcatcaagctcacttccctacgcagaatccgccgcctggaaaccgtgtgggacgacgagaaacacttcgaggacgtcgcgaaatgccgctcacaggttgccaggaatctgatgctggaatgcgagacaggaagagcacacaattctctcattcgcgccggctacggcgggtggctactctacactgctgcctcgggcggtgacgtggatttcgttaaggagctgttggggaagtaccctgctctcgtgtttggtgaaggagagtatggagtcactgatatactgtatgctgctgcgaggagcaattcttgcgaggtgtttgagcttctgcttcgttctgctctctcgccgccgcaaatggaggatgtttatgagagggacatgatgaatagagcggttcatgctgctgccagaggagggaactgggagatgctgaaacggcttgtgaggaacggttctggcgttttggggtttagagatactcaaggatgcactgttcttcat

SEQ ID NO: 5636 - DNA, 712 bp, Glycine max
acctaacaatgataaaccaaaatcagccactcttgcattgtgttcttcatcaatgagaatgtttgaggacttgatgtctctatgaatcactggagggcaagcatatccatgcaagtattcgattccacgtgccgcttgaactgcaattgtgacccttcttatccaatctagttgctctctcaacacttggtttgttccatgcaagtgttggtgcaaagatccgtgagccatgaactcatacacaagaagcctctcttcaccttcttcgcaataccctagaaggttgagcaaatgagcatggttcaaccttgagagcaagtcaagttcagtgttaaactccttggagttcttctgcatgttgggagacactatagcccttttgacagcaacaactgtcccatctttgaaaactcccttgaacacacaagaaaaacttcccttccctactatggactcttccttgaatccaccggttgcagtttcaagctcctcataggtgaacatttgagcccttctgatcttattaagttcctccaagtctggcctcaccttgttctcgttttggaaggaagaatttccaccaagtttcttcacccctgacccttttgaacactcacaatctcttagcctgtagcggacgtataaaaccgtagttattgacataatactaactacgaaaactgcaaaagcaatctcagcaatgagaactggc

SEQ ID NO: 5637 - DNA, 737 bp, Glycine max
tctctttttctctgtcatgattaaaaaccatgtgctatcgcaaatagtgtgattgctaattttgtgcctctgaaaaccagttgtaacatgcacattggttgatgtacctttcttgtcatgggcaagtcccattaagagtagctgaatggcccccttttgggtttatcacactctgtaagtggtagttttagtcgatattttcttaaacccatataaaaggttgtgcgatcctggttacagtctgtaatgagtttctattgaaacaccgaaacacatctgtaatgggtcattgttaaactgacttttgagacacatgtttttttttactacaattttagtcttgagtggtacaaacaaggcaaaacagaacttaatgtaaatggaacattcatgaagtgagtttgatattgttttagtagcagaagctgtctggttatatgtatatagttagtggaggactgaaaattcagtgttcagaatttgaacacaacgtccaattaaatgctttatttagttaaatggtttctaccaattgttaattattgatctagatctaatccctcttgtataggaatatgaagacaaaatgcgggaaaagggtgagaccccagttatgttcaggttaagaatcttcacgtcattttaaaatatggatttattcccaatttgtgtttgtgtagttcacacattctaggatgtctttttggcagtcatttggggcctcctcgaaggagaac

SEQ ID NO: 5638 - DNA, 826 bp, Glycine max
ttccacacagagaacaacaaaccacattaaatgttttctgattataacttaagagaaaaactatgaagtgaaacacatacaaattttagaaatatatataatactctcaatctggcatgaaacatcatcttatttgggactcaacaaaagatcacatttcccctttgtcagagctcaataaaccatctccccttttgatttatatatcgatcgttgatggccttctcatgttttgtaattgaatcagttagctcccacactaagataattagttgccctttaaaaggttaaagctacctgcccttgtcattaccaaatattgaaagcattaactgccactgataagtgctgaaaaaaggcactggttttagaaattcttctaccctaaaccccaaaaacgacttgcttatatgatcttccttgtgtcaccttaatccatctttgcatggtctcatttaaagaacatgttttattcaataaaaccaacagactacatctagaatcaagtcacggaggtcaaatcatactatttgacattttcacatttaacttgaaaggcattcaacagtagtaaaacaatacaaccataagccaaacttcccctacatttaccataccaagttttgtgagcaattttttatttaaaagcaaaagtgtgtgtataaattagtctgagacagaaaaaggaaagtacctgatgacaatagaggtatccagcaccaagttgaaagcttaagtcacaaaaacgtatcttatgcatctcaatggatctaaaatgaggcaattgtgatgcagatttctcacccatgattgccttttgtttctt

SEQ ID NO: 5639 - DNA, 586 bp, Glycine max
tgcatgcctgcagcaccaacaacagcaacagcttgctgcatcgagttctttgagtccacatgctcagccacagtcccagctttctgtatcatcacctctgcaaaatagttcacaagcacaacctcaaaattcattgcagcaagtatctctttcccctgtaacaccaacatccccattgactcccatgtcttctcagcaccaacagcaaaaacatcacctaccacatggtttcagcaggaatcctggtgctagtgtgttgcctaatcagacagcaaaacaacggcagcgacagccacagcagcgacagtatccacagcctggtaggcagcatcctaatcagccacagcatgcacagtctcaacagcaggcaaaacttctgaaaggactaggacgaggaaacatgttgatccaacaaaacaactctgtggatccatctcatctaaatggattatctgtatctccaggaagccaaactgttgagaaagtggaccaaatcatgcccgtgatgcaaggtcaaaatttatatcctggatctggtaatcgaaatcaaccatccaagccattggttcctgcccattcttcaaat

SEQ ID NO: 5640 - DNA, 773 bp, Glycine max
ggtaggtaattgtcacctcgaataatttagaccagttttttgttgcatttatttatatataatagacataacataagcatgcttgtttgcatacgtgcattatatatgtttttagcaatgttgaggacataaagttgtggtaagcatccgcaagcaaaaagagagcgggaaatgtctaatattatgaaagagggttttggagcatccttagatcatactgaacccaaaatctaagtattttgtgtccaataaacaagaacctattaacttcgaaagaagtaagacttgacatgtaatgctgtttgtctcctatatattgttttatgattgatttggatttatattcataattcataacttaaccatttcttgtggttatctcatgctggttgaagagagactgttttatgctgttagaacttagaagcatggtagtcaaaatcgaaatcttaccgagaaggggagttaggatcataaatcgggatttcataaaatggattgggagattgtatgaaagtcatatatatgctatacattcatatatatgttcataaaaaagtagcataattgaacttaaattcaaaatcataagtataaaacagtcctagtgcagcaatctgacaagtgggatgacagaagcagagcaaaaaataacaaagttataaaacacttcttgtaaagaaaataaatgagaatcagagatgagagacacgaacaaagaacccacaagcctagttgttgcagagaagccacttaacaaaacccactagagt

SEQ ID NO: 5641 - DNA, 746 bp, Glycine max
aagttcaaccaaactgaatcaggatttggagacaggcctagatgcatctgacgctaatgctcaacttgtaaatttggtatggaaaacttatatggattttcatactgtttgattaacttttatggtggattagctaaaatgcaagaacaatcaatttactaatataacatgcaaaatcccttttaaattagtatgctgaacatctatgtaattgtgcttttgtatcttaaatttacatcattcaatgctagtagtaaactaaatattcaatgttgaaatatattaagaaaaaaaccaaaagaatgaaaaggtcatatggattagctcctcttattttctcttctacataggccatatataattaacaaagaagaaaatatgattgtagggttaaaaaggaatgtaatttttattgtcaataaacaaaaatgattttatatccttacccgccctgccccccaaaacaagggtttatcttccggaagatttgtcaaggataaagctcaagctattaggcaaagatacatgagtgattttacatctctaacattgatattcaactctaattgggaatcacacatgagatgctccttagacgatacattatacgggttgagattaaactcattagttttccaccttaaattttgttaaacttaattttgttgacagctatttattacaccatttactgttctatattgctcctactgcgttttgttcttagagtgcagtgcatcgagttg

SEQ ID NO: 5642 - DNA, 902 bp, Glycine max
atgagttccatccttttggaggttagcaaaactactcccttcatcaaccatatcatccaataatggttccgcactggatccaagtctcctccttcctcttgtcctttgcagcaatgcccacccaaacaacacaaaaaccaatacaatgtacaaaatggccattgaaaaatctacacatctgacctgtaggtatcattatacgaaaaccagtttcacaacatgtatcaaaagatgaaagacagtttttcagtagaaaaccaattgttccactggattatgattcaaaaggcattacttttaagaaagaaaaagacagaatttattcagtcataaagcaaatgaaaattaattataaagaaaaaagcagcctctattgtttcaacctttagagatccaattctaatggagcagggatcttttctgggtggagaaagttctgaacccgagcaaacaggtgatgaaggacaatcaccacaagagcagcccaacgaagtgtcattacatgaatatacagacgcattcataagtttcataggagaagaatcaagaatggttgtcttaaaaagtatagaataccggagaccaggataaaccagaggactttctgaccaaaaatgaaaccactttgcatggttatagaaacactttccgattaaaacagttaatcctgccattaaaaaaaagaaattttttagtttaaaacattaccctcttttacaaaaagacaaaaaaattgttgagtgatttaagaaccggtcccgcccaattaaatgaaactgtccggaaatgttctcaatccaaaaaaccaaatagaaccgggctaaagaaacataagggcccgccctacggaatctcccttaaatcacggaggggagggcctctttaaatctctgggggaaaaa

SEQ ID NO: 5643 - DNA, 780 bp, Glycine max; identical to SEQ ID NO: 3403

SEQ ID NO: 5644 - DNA, 755 bp, Glycine max
aaaccaggggaaatggaggctcagatggctgaagttggcactgagtatgttctcaaaaacatccttacaactcgcaatcctggtcctccaattcttcccaagggaaggtttcaattcaatccagaaatgcccaacaccttgccctcttggctcacagaagaagatctcgcctattatgtctccaaatttgagaaaaccggattgactggacccttgaactactacagaaatttcaacttgtaatttcttgattctccgtatttgcccgggataattgttttccactgctctaagttaatgtttctttcttgggaaaatatttgttcaacatgacgggatcccaataaaaaaagaccattaattaattaattattgtatgtatttgcagaaattgggagttgacggcaccatggacaggagggcaaatcaaggtgcccgtaaaatacataacaggtgagttggacatggtatacaactcgctgaacttgaaggagtatatccacggcggagggttcaagcaagatgtgccaaatttagaacaagtgattgtgcagaaaggagtggctcacttcaataatcaagaagcagcagaggaaatcgataattacatatacgattttatcaacaagttctgatcttgtccaaaaacgaattcaaccagatataaagtcgcagctgaagtgaaagggtgttataattgcgcttttgttttgatatttaaggtatcgagatcttttttatgggcaggattcatc

SEQ ID NO: 5645 - DNA, 821 bp, Glycine max
atgatggagggtcttgtgctgactcagataatccctctacttataatgaccaaattctcactcgaaattaccagaacattggtcttaacggtgctagtacttccatttctcatgattttgagaggctttgtaaaactcacttacccgaatggcaatcccactatttggagcaagagttagtctctttaccttcaagttctttaaaacatcaagataaggctaatgatggttctcattcttttattggtgatctcagtattcaaattcctgctgttgatcaatttgagaaacctgatgatgatggtgatttatgtgatgctgaacactctcctgatttctcttggaatataaatggatgtggtattccaagctccaatccaactgctcacagaagttcttggtatcagaaccggaataattccttgtcattgggatttcagtctcatgtgtggtctgataaaaaggttgattctctttgcaatgatttgagcaatggacctaaaaaaccacgtacacaagtatcatactcagtgccttcagcagggtatgaattcagttcaaggcaaagaaaccatcatcagaaagggctttctcacaaacgagttagaaaggctagcgagaagtcatcagatgttgctagggtccctgaaaagaatatcaaatgcttatcttgtggtgcaaatgtcttgattactcatggtgataagggttggagagaatccagggcccatgttgtactagaggtgtttgaccacaatgagtggagactttctgtgaaactttttggaattactaggtattcatacaaagcacaccagttt

SEQ ID NO: 5646 - DNA, 838 bp, Glycine max
aagatattgatcccgagtttttagctgctcttcctccagatattcaagcagaagttttggcccaacaaagagctcaaatggttgcccagcaggctgaaggacagccagttgacatggataatgcctctataattgctacttttcctgctgaattgcgtgaagaggtttaaatctttattttgtgttgtgcacttattgaggaagttctattttgtgaaaatatgacatgattttaatccttgtattttgctctgtacttaggttcttttgacttcttctgaagctgttctgtcagcactaccatccccattgcttgcagaagctcaaatattgagggatcgagcaatgagtcattatcaagctcggagccttttcgggagcagccacaggcttaacaatcgaagaaatggtcttggatttgaccggcgacctgtgatggatcggggtgttggagttacaattgggaggagatctgctcttacagatagcttgaaggtgaaggagattgaaggtgagccactacttgatggaaatgcattaaaagctttgatccggcttctacgactgtcacaggtaacttggatctcttcatgatggtagtagtcttagttaccagtctcatgctggatgtgaaaatgcattcttttttattcctaatattgtgcctgctatttattctgtagatttttattataggattttcagtgtgtgggcagacatgttttagttttggatgtttgtatgtgattatagtaacttgctgttaatttttgtgtcatcttgtcagccccttggaaaaggcttctgcaggtcgatatagaggtgcccgggtacgagt

SEQ ID NO: 5647 - DNA, 868 bp, Glycine max
tatgaaccctggctttaatatggtctctagcaatgctacggtgcctgctttcggatcctctacagtgcctcatttgcagttaggacattcctatgaacccagtggttggtcttattgtttgccctgctttccacagggatttgctcctgctctgaacttcaatgctgagggaaaccctcctgctgaccatgtaaaaacttttggggacaaaattggtccctatggtgaatccagttcccttcagaaacaaattcttgttattgatcagacgggtggtcaaacaactattgtttatagctccaggtttggcagtcctggtgagtgccttgcttcttggcattcaaaactgcatggtgctaactatttgagggggaacgaaccttctttcagaagaggtttgaatttgaatttgaacttgaatatgactgagccaactttggctgataaagtagatgggaatccgggaactagcattgaaagtgagatgcatgaagacaccgaagaaattaatgcattgctttactcggacagctatggctattctacccaggatgatgatgatgatgaagttactagcacagggcactctccgagtacaatgaccactcatgataactgtgaaacctttaggagggataccgcagaagaagttgcaagctctgccaggaaaaccaagaagaggaagctattggatggctattatgatgacatacaactcattgatactgccagttctcagaatctgaacaagtcttctgcaacgggagatgatgacgcagaatcaagatgttctagtaacaacaatgaaggatccttgtctggcaataagaagattaaaaaggagaagatacgcgatgttctgagcatt

SEQ ID NO: 5648 - DNA, 734 bp, Glycine max
ttcggactcgtacccggggttcctctaaatcgacctgcagctcttgtttccatattgtttttctgtcttaaatttatgaagcagagatggagagaaaggactatataactcagttttgtggcatcaaaatacgtgtctttctttccgctataattttttttcttcattttagcagaaaaatgttaaaaatttatttcaggagatttcttctgtcaagatcatgaaaatgaagccaaacaggctgaatgatgctgattatttcatttaattaacattggatagtaattcattctttgtgccttgtggattcatttcatagcagccaaactcaaaagtattcagaaattgagcaatagaattcagaaactattcttccaagtgaggcttattatagatgtattgaagcaagatcacataagataatgaaatgctttttcaaaagcttcacaggatgtttaatctcttatgtttttttttattgatgtttcattttaaatagttactgagagttgtttttggggactcgattatgtgcttgtaacttaataaaatttccaattcctttttatctatatgttccattatcaaacaacaatgtgttctactttatgaagttgcaacttgattatgctgtcttttacacttttccagccattctggacgtattccttagttggaaagcaaggaaagtcatgtcgcttcatgtccagctgcggtatatatttaaggcaatt

SEQ ID NO: 5649 - DNA, 818 bp, Glycine max
aattaaaactaaatcctagattttctagaatagacctccaatctgtgggtagtctgatgccttatcaatgtttctaagaaaagcatttcctgctatgttgcttggatgtgggtacaaataaaactaaggtccccggtgccatggaggctccttgttgcacaaaggtatgagagagggtcattgtatctagcatttcccttgtgtatgcaaaaaggctatttctggattcaaacttgtggccgactggttactaagggaaactttaccgttatgcgatatgaatacatccccaattttggcacatatgtgcatcataaagatttaatctcttactgttccatattcttggtactgggggactggggttgttagatttcatatgcatatcattggtagttgatttgtcactttctagagaactaaaacctccaggttgtcttgtgcatatcattggtagggggctattaacctttttgaagatagcaaatactcatttttctttgaagagacatcaatcatgagggttaaattctagttcgagctgccttaaattgatacaatctacatatttgtaaataatatgcaagcattacttattagagttcttattctggccataaaaacataccattggaaattgagttgatttttgttgtctactattagacaattttgctaagtacaattctattactctcgaagttctgacccattaaattaaatcaaatcactaactgaaattgcctgttctgttctaaaatatgcagaaatttgaactcaagcaaaataccatccttcttcagttaattgggaacctt

SEQ ID NO: 5650 - DNA, 848 bp, Glycine max
aacaaggcgaccaaaatagccctcaaggatcaaacatgaaagatatgaatgttttacgtgctactcatgaggaatttgattaccctatggtggaaggtgatgaagcttctgaactaggcaaccacaatagccctcaagcatcaaacatgaaagacgtgaatgctttacatgtttctccagaggaatctgattgccatacggtggaagaagaagctgttggacagggcgaccacagtagccctcaagcatcaaacatgaaagatgtgaatgttttacatgtttctcaagaggaatctggttaccctatggtggaagaagatgaagttgcggaacaagacaaccagaatagcactcaagcatcgaacatgaaagatgtgaatgttttacatgtttctccagaagaatctggttaccctatggtggaagaagttcagaaatccgaagacaatatttataatggcagtgtctacaatttccaaaacagtggatctgaagttgctgatgggaagaccactttaactgctgatggaaagaccaatttaactgctgaacattttgtagatgatgttccttctagtttaaataaatatttggttggaacaccagatctatttcagagaacttatccagagaatgaagtcaagtctagtggtcttaatattcatcaaggtatagtgcggttttggttttcaaatttattggttatgtctaactatgatttcataatcttttatagctggctttctgaaacatttgtctgcatgtacagatacttgtgaagaggagttaaaataccacaaaagacaggtctcattgcagatccagggggatgcatttggattttctca

SEQ ID NO: 5651 - DNA, 807 bp, Glycine max
tctcggaactacactagttttccttgtcttacgggtctccttttattcgctcatgattcattatgtttatttctttgaatttttccttggcttgcgtatgccactttatattaaattaaattaatttggccccccttaaatttattcttttactatatatatatatatatatatatatatatatatatatatatatatatatatatatatatatattgttgtaagtataattaagttgtgtttacttattggggtcccctcttatctgtcttaactccttgagaggttggtgtagtagctttttggagggttgacatggaggaacggtacgagccattgaaggagcttggagctgggaattttggtgtggcaaggttggccaaagacaaaaaaactggagagcttgttgcggtcaaatacatagagaggggcaaaaaggtaaatttataggccaaattgtttcagtggcttgtgtcaaattcaattgactactactgactaatgctgttgttggttcacatattttctttgcattgattgttctgtttttgagcgatctgaatttggaaactgagcagtcttgtctgcatatttatgatatgataagaagatagatacctctgggccatgtttttttttcttgttttctttcagcttgtgtactttcaaaatcttaaattcaatgttcaatgtgaaatcaaagtagaatagcaatggtttggattttggaaactgttatgcagagggggggggtttttcctggtgatgatattttccctcctccttatatttctcatctagtcaact

SEQ ID NO: 5652 - DNA, 858 bp, Glycine max
ttcgccaggcttgcactgcctgcagaaaaggcactgaattgcttcaacaaaatgagcatggaaaaggtaagaaagacatcagctggaatcatgctcaaagagaatgcaaattcatcaaagaaatatgcattagccaacaccttcaacatcatatagagaagcaagggattcaggattgacagttatccaaactcttaaccctattcagctcctcttactctgatgacagaagtcaaattgagtttatattttatctttatatggatgaggacccaggttcctggatattttacccaaaaaattgtataataaaccatgaaatcccaagtcatcttctgtcctacgtcattttaagtctaaataccttagaaatggcagtatgtacattgtactaagaaatgaaaaaacataagcgattaataattattgaacctttcatgcaaatatcctctcacaaagaggaagatctacacaaacaattagcaaactcaggataataataataataataataataataataataataataataataataataataataatgaatgaatgaatgaatgaaacattttgtcaattgctaacatgacatagaggtgaaaacaaaattatcatcattttacagaatttatgattttaacccgtaagtattatcatagtcaaaaagtttctctttccaattgaaatcttgaactcaaatgcaggagggatcatccttgactctaacatgtagaaaatgcatggatggacatagaataaattcttgcatttaataacagaagtttacaggttgactcttcatcatcctcatcacaccatttgttccaatcacccttcagtatggagcaggtt

SEQ ID NO: 5653 - DNA, 830 bp, Glycine max
tgtaactttcttgaaaacattttctgcattttttggtgttggtttaaatattacaattcgaaaatcttttcttatgcttgatgcagaaaaacattttgcagataatacatttccaatatttgatgaaacagtaaataaataatgtgttttctattgaccatatgcattggggtcatatcatatcacaggaaagataccaatctttcattcgatgcattcattctaaaatatgcattcttaattgaggtggaaggaaagcctactaaaatgatatgtgccctgattcctgtgaggagttcactcagcaatacaaaaaaaaaaagagatgtttgctctgaaactttgcacaaaacgtgacttcctatggctgctgtataggccatatgtcatacctgcttaaaagttaggtaaataacatgtagcataagttcataagagttctctcccctaaaaatttttgtgcctcttcaggggacaacagctctctgcccttcctatagaagtcattttaggacaccaatttatcagaagatttatatatgaaatgcgccacggtttgtagatggattcaagacatggtgaggtacttctgtgaatgacaaactaataaagcaaaattttctgcttaaagtttgagatctgagcattatacaccaaggaaaaagtggacaatcaagttttgagatctgagcattatacaccaaggaaaaagaggatgatgcaacccatgtcacattgaagcttataatgatgaaatgcattatctattacttcatgggccaactatgaaagcatgcacccagtatcatttcaatttgaaattttgatga

SEQ ID NO: 5654 - DNA, 821 bp, Glycine max
agcttgcattgcctgcagctccctagcatcacttctttgaaaagtttttctgtaagctccccttcctgcaatcatgaaatttaaaaaatgtttaatacatcaactacttgtttctcattttttgggtaggaattaagaaataactgctgttcctattcataaatcatcaatctatatagccataacataatcattgtctaatgttaatattttcctgataaaaagaagatttttattaaaaagaaaaagcgaatacctatatggctgagattaatttttaagaactgatgaatcaacagaacacccatcattaccagcacatagacaccagagataacaaaacagaacattcaaaaactataagaactgtatgaaaataaaagccagtgtaccttttccagtttgtgcaataggtaagtcttgaactgacgaacaccacgcccacttgatgttggatccattgtatgggccttctcaaatgcatggaagcggcctaattagaaaaacaaagaaacatcagtattatatactcttctgcaaatatacaaggtaaaaacaccgttgacatgctgaaggaatgcttccgttccattttgttgtttcatttcccttttagatgttgattttgaatttgattttgctatcagagtaacaattttgcaagcagaatctgggttcaatgtgatattttgcaataaggctttgttttggattgttttactaatattcattttgttatatcctttttcttctcagtactgtttggattatgttaaacaaagcaaacttagtttcactgaaactgcccttagaaaaggatt

SEQ ID NO: 5655 - DNA, 873 bp, Glycine max
  misc_feature (826)..(826): n is a, c, g, or t
aatataattttaagacaatgtggttaatgtcattgtgtatggcaaggtaatgataaactaatgaacagaaatacctgaccttaaaatgaaggaaaattatacactatatatgtgggcatctgtatgttaaattcagagtttagtaacatcttaaatttttttttaactgcttttggttcttaaactcgtgcatttttcacaggctcagaaaaaaaaatcctcacctggaagcaaattgagcagcatgagtcgttgtataatttgaacattttactggaattgaattgttgaacaggaagcttttgaatgatattccaagccatcccttcgactgtgatttccctgacaatattgtcattgtaaatatctgattcttctccgtaagttgttgcatgtgcactgatctgaaaaaaataatttaatcaaagctttgttatcatatcaagaactctaatggggcctactgatttgacatttatataagttttgtatacttatccttacatgacaatgataggcttgtgcaacagctggacatatccattccataaatagctttccatttaataaactcctcaatagggcaacctgcatatcaacatcaaatttaagagttcagaaatgggagaatgttattgctagttggcataagcctaaaacattgattctatgatacatatttttaggacttttttgtaagttgttatttttagaatatgttgagaaaaccttttttattatcttcatttcatgtttcactgtacactaaaatgctactttttataaaagaaatacacaattattgtgatatttaaaacatatcttnaaataaaatatttgcttaaacaaacaaaatatgtactgtaactttac

SEQ ID NO: 5656 - DNA, 682 bp, Glycine max
ttgcatgcctgcagttagtacgacagttgtaaagttaaagatctctccaaaacagaggaaacataaagtagataataatatttaaaaattggtaattaagcacggttaatttagatacatgtaatatgaattggattagtgattctatgattacctgggattaatgatagtatataatcattgacctgttcgactgtttcgttggttgaagctaatattgccctgctattgaagtactgactatcattgtgatgttgtgttaaatctaggaatgttgagttaactatggcatggattggatcattatattgagttatcaacaggtcctcagggatttcaattgtggaatagccatcattttgaagtccaataattccatctccaatgtcaaggatccacttagcaaatgcagcagtttcttgttcatttggtgattgttcattgttctgcaaacgcatgttttttgtcagtcttaagacctaacatgaatcccataaataagaggaattgattgttgcattgatgatgtctgagcgacttccccttggaatgactggtagtatttgtcgaaagtctccaccaaatacgatgactttacctccaaatatttgatttgacctgggtttagttataattatatctcttaaaatttggttaagcgcttcaaaaaaaaatttgtaag

SEQ ID NO: 5657 - DNA, 857 bp, Glycine max
tcccaaacatcacctctccgagcccaactaacaaataaaactaggttactaacatataaagcaagttgtgaagtcattaatgagcaaaaatgttaaagcatccaagcatgtacacattgaaaaaaagtaaaaaaatagacaatgccctcattcaagaatatattcagatgtattaaatcttacccatcaattagtatgttatagacaaaagtgtttcttggaatattttttgcactcatttcttttgtgactgcaagggcactctgcattctgcctgatttgcaacatgacttcaataacgcttcgtaagtataaacatcaatctccaggccctcattcctcaacactgtaaagtactgaaaggccttttcagtgtcacccagtgaagcataaccttgcataagagttgtatatgtgtgttcatttggtccaacacctgccacattcatttcatccaatattgctacagccttggtcatctacaagaaacataacattatttacagaatgtagaagttatcgatgcatgcactaaaacaataaaactaacaggaacatccctctgtacatctaacagtttgtaatccaatcatactaagccagaattaaatcaaaaagataattagggctttgataggatgggttttttgttttatctgcaatgtatacaaatctgggtagagtaaaatatcaaagaagacagaatagctgctgagtgcagagaagatgacatgaaacaaaagcatcacacttaggggtcctgtaggcatcacaactagggttggattgagccacgtctcaaagagcaatttgttttgtgggtaaaactaatcaatcatatcataagactattagaa

SEQ ID NO: 5658 - DNA, 802 bp, Glycine max
aatacactttttcatccttaaaaattaccaatttagcataataattacactttaaaggccaaaataaaaaaatgaaacttaaaagaccacaatataataaaaatatataaataagaaatcaaaattatatttaaccaaaaataataataaaagaactcaaaatgatcctaataaaatataaagttaacttattttttaaagtttgaacctaaaatattgtgcgagctactcaaattcccaaatccctacatacatggctagggatgacaataggtgggttttggataggatcttatagtgttgattctcatacctgtgttttaaaaaaatcttcatacccggtctcatagcttgacagatagtaactttaaccctcatcttgtttctattagatacttatatactcataatcacacttgcaactcacactaatgtataaagttaataaatcaagtcaagttaatacataatcctgagttgtctaaactcaagtcaatacacaaaaattacaaaaataataatttaacattatgattcctaaagttaatattctaatcgcttaataaaaactctaattaaacttgaatatcatggataatttatgtgtgtgtatatgtgacatgtacataacaagaggagtgagtattataatattcatacctgcactcatatctatgtaaatttacatataaatattcgttttccatacctaatctcaatatgtagataattattcttttgacttgtaaataattttatagatacccgtaagatcaggtggacttttttgtccctattgtac

SEQ ID NO: 5659 - DNA, 826 bp, Glycine max
taccattaattgaacatatgtaattaatgtgcccgttattgttttactaaattaatgtttatgccaggtacatttctccttgtgaagctgcttggagaatttttagttttccaatacatgttaggaagcctgatgttgaaagattatatttccatcttccaggccaacacagtgttctttatgaggaccatgatgatattgatgatgtcctatccaagccaagcatttcagattccaaatttttagcttggatgaacgccaacaaatgtttttcagaaggaagaaatctgacttattcaaaatttgtttcaaagcttgtatataatgaaaatactagatcatggcaacttagaaagaaaggatgcactattggaaggcttatatgtgtcccactaacgacaggagaattgttttatttaaggatgatgcttactgcctgcaaagaagctacttcatttgaggatattagaattgttacaaatattcaataccctacatatagagaagcatgctttgccgtggggtttttacaagatgacagagaattcattgaagcaatcaaagaggcaaaggactagggcacaactaattatttgaggaaattatttgtgttgatgcttttaacaggtaccatcaataaacctgaagaagtttggaatcaaacatggcattggctagctgatgacattgcatatcattatagcaaatcaacaataaatacaggttagtttttgattaattcttacattcaatcccatgaacaataatcataatttgactgctaacgtctaatgtgttagaattacacatcgatgataatcatctg

SEQ ID NO: 5660 - DNA, 844 bp, Glycine max
aaattcagattggtctattaaattaaaggggtaatgggtttgttggaacataggcttggcttgagttagatttgtgtttaagtgatattgggtcaaaatttgtagtgggctcactgagggaagaataagttcttgttgattttaattctttactttattttttttcattttttttttggttttcattcttacttttatgatattgcgggttttagttaggttctttattttcttctttgtattgtaagccttcagatagatggcataaaatgtatccattaattttttgcccctttatgaatatccaaaatgagagaatctaaaactgaaatgaaaaaatgctggacctagctactgtgctttcaaatcttagccagctggtcttaatcttctttctgcaagtgcttttcttctttgtgtttgttgaatatttcagtactcacaaaggttgtaacatgatatgcagctttcttttcactccaatgacgaagagttctaaaaagacaccaactcagttacaagagaatactgttgcagaagaggagagatcttcatctacacccaaaaaagcaagtaatgaaattgataaaatatttgctgctgggaaaaagaggaagaaatctgaaatggaaaagactggaaaatctggtgaagtaactaaaaagactgacaaaacgaagaagaaaaagaagaatctgaagaggaatcagtcagataatggcaagtttgtagacctgccttctcgaccaagaaagaaaacagaggatggacttactgtctacaccgaagaggagttaggtattagtaatgcagatgctgggaatacgcctctctgcccatttga

SEQ ID NO: 5661 - DNA, 855 bp, Glycine max
aaatatgtttgaggctatgcatttctcttttataagtgttatttttttcttccttaagattcatcactatggttgatttggaagttgttgcaacctgtttaaatattctccattttgattccttgtgtgcaccaatccttcaattggctgaaatctttagaggggaaggttaagcatattttatatatttatttatttgattggtggtgacacttgtgttcagaaagaaaaaatccttttcataagtggataatttttgagaaggttcatttctgttttatcctctagtagtttctcaatgctaagctagtattagtgtaggtaaggaaggaagaaagtcctgtaatataaaaaaaatgtttgcaaaaaaccatggcttaggcttagagcatgtaacatgatcagtgattcaacctcgtgacactagagatacttcttagtattataacttggaagttggaactgcattcctttctttttcaagtttgctcttccttttttcccatctttttcttcatttgagaaggaacgccgagaatcttaatgttggataaataacctgacctgtgaacttctatactttgtcttacacttttccaaggcatttgatgcagttaaattaagtgtttttgatcaattaagcagtaattctccaaaaatttggcctacaaacaaacaaaatttagggctgcttttacctaggaaatttcatcttgcaacaccatgcttgtcaccaagttttcattcctggaagcctattcatgcatcatgaaaaatgtatttttttgtgcatgtggaattgtttgcattttactattgtgcactaatctatcctgagtattctgtgccatacaa

SEQ ID NO: 5662 - DNA, 853 bp, Glycine max
aatataaaacataatgctcacagattctacaacataaaaaaaaaattaaataaacatataataaactaaaacatggcattcattcatataaaagatataaataatcatatgttcttgtcaatgctctagtcatatctcagggagttgcatcaagtattgcattccctcacatgcaacagaatttatgcgccacatacatccattgtctgctgatataaaaccaagccatttctaactactccctccatccctttttataagacactgttttgaaattttgtctctttttataagactcttttctacttgtccattgcattaattgtttttactaatgtacccttaatgaatttagttcataaataatagatgctaatgctatgaattgtctctttctctctcatgaggattcgagaatgaaagagtttgattttaaaaattaaacctccaccactattattctctctccatgcattagttacttaagggtaatttaggaaaaataatacaattacaaacaaatctaatgttaataactaaattaaccaactttcttaataagcataaattagtcagcaatgtcttgtaattagggagggagagagtatatgatatctaagttacaataaatgcagtataatagcaatgtccatgtttgtcacaacatactaccacaaagaaaaagaggacccatgtaatatgatagtttccctgataaaatccgatttgggggtgcaagtctttttcttcaaaacatcatcactcgaaagcactttgcatacctctgtatcactttgagtacccaattctcccagtcgttttatatacccaggatctttactgcatagggatg

SEQ ID NO: 5663 - DNA, 849 bp, Glycine max
tgtaacagaaagaatgagataaaggaagaggttgaaccagaaggtaggttggtactgactgctttttaagcttcaaattaggagtgaggtggttgagatatagagagaagagttagaatggaaagttcaaattcaattagtttcttgtttaatatgtggaaacaaaagtaattaaagtgggaaggaaacgtttaaactttgctaagactagtagcatgagtttggatatttcttctaatagtatattaccacttaaaccaatcgcacgtccactagaattaccgtggaacctaaaccaaaaaataacattgataaaacaagatcttgatgtatcaaggttcaagggtgttggacataaatacataactgtcagtggtttcaggatggcaatagcaacgttgcacctgcacgtgtgataggatcatcaagagcaacaataacattagccccacaagtgtgagatcggttacatgaatcatacaaatcattgaatttgcttaaaaactataacaagtaattttgatgtgttgtttcccattgttttgtgacgttgatattagaagcttagaaaattggggtgaacatatgacatctttcttaatttttatctcaatttctctcttgtttcttgttaagattatatatatatacacggacttactccactcaatgccaatgcctatctttaatgtttaaatttagagttgatctcttttctcaatttttcaattaaaattacatcaaagaagtcatatatttagagataatacattgtttattcttgataaggatgttcaaaattaattcacaagtgaggactaaaaattgagtcctgatacaaatttattc

SEQ ID NO: 5664 - DNA, 862 bp, Glycine max
aaaatctggaatccccataccgcttgcttactaggttcacaggcaacaaatattttatgtatgctgtgagatggaaaaatgtattacacaatgtaagtctaacgtttcctgctcgactttcgtgcgcaaaatccaaactgtaccacctttaattaagtaatgattataatcttcacctagcttagcatctcatgtgcaccttgtcttttaactccgcatgcccattctcgtacacatctctctcctaatatgattaagaaaaattatacatttttttaaaacctacaaatatttttcttataagatttaaagaaattaaatatatctttatttaggtttacgaaaattaaacacctttttctttttcttctgtttttaaaacttacataaattttttaaatgtagtttaaatgtttgacaataataattatacgttgataattttaattaaaaaaaactaaattatatttttcatcctcataaatgtgaaaaatatttaaaatttatcattgtaaatttttttgtcctgacaagatttaaatctattatttttatttggaactaggttcagatacatttgaattcacctgtatgttgttgtaaaatttagaaagcgtcatattttttaaattttttctatatttgttatacatataattgatgcaaaaaagttaaaagatctgacactatataacaatgttcgcttaagttgagatgtaaaagttcaagtaacctgaacctagcttcaaataaaaaaataacacatttaaaattttgtaaggacgaaaaataaattaaaaaaattataaatttttaaatattttcatatttatgagggacaaaatatattttaaatcttttt

SEQ ID NO: 5665 - DNA, 790 bp, Glycine max
aaaatagaattaaaaaatattaacatatatcaagaacaaactagaaacataatgtaacaactatgttagaaataaatgtcaccataagtactcaatccacaaattttagggataatctcataaacctcatagcataagttcagagacaaaagagaggaacagagtgactcaaaacacaggaataaagagattaagaaaacatagagaaacaaagagatcagcaaaggagatgcagatgaaaggaatgtatagaaacaaaaaaatggagaaagaaggaaaaacaaagaaacagggactcatgaacagagcttattgggataaccatatcagttgttcgcaacgatgaaggtgttcagttaaatggatctcctgtgttgggtttgagaagacatgaggctgcatttagaatttcagtgtccaacacatgttgaatgtctgttgatggtctccatgttgggtttttaattttttttttttaaagggtgtaactactgcttttttctccatagctgctatatcaaaagtggccattctgcaatgtcatggaccatggctatttaacaacactggacataagatgatggaaagtaggaattggtatggaaaggaaatgaatataagaataagaaatactattgaatgcagaattgctaaatgtttattgatagtataaattattttatgactttgcccagtacctgaatttgggaaaggtttctccttttgtattgaattttttaataaggagatagttatttttcctgcattggtttggaaacaaggggcattt

SEQ ID NO: 5666 - DNA, 778 bp, Glycine max
cttccccttccctcttcccccattcttctcaccaccctttccctttctccttgcatttttttttccgtttttttatacacaaccaaaatataatttcatcgttttctggattgacaattacaacaaaatcatacttcgattgtattttttattttttgttttggaaaccactacaaacgaaagtacaattccgttgtgatttttaacccagaacataatagaattgcactttagttgtgttatttttttgttttgaaaaataacatagcgaaagttcaattccattgtacggtggggatgaaattaaatgacatcctagatgttatctagggttatgaaaaattgcataacaaaatcgtatttccgttgtgcaattgagggtgaaaaaaatacataatgaaaacataattttgttatacacttatacaacagaaacgtacttccttgtgtattcttttaatctccaattatacaacgaaaatatgattctattatgcaaatttttaggggatagttttggaataagggtcaaatgcacctaggtggatagtgccattagcaaatgtggtaatgccaatagcaatacccgaggtgttggaggccgaagctcgtggcctggttcatgtaaaaattaaaaggcttgttgcattacattctccaatttacaataactattcttctcaaataaggttttatttatttattttataaatgtttgatggtgggttggtttataatactcgatatactaaagcgaattgcatacccaacatgaggg

SEQ ID NO: 5667 - DNA, 826 bp, Glycine max
cagaggaaaatacaatcaggtccaccattttgactgtaagtggaaagtagtccattagtctgatatctttccacctcacaggctcgtacaaaaacaaaggttcaaatgctttatatgttctactttccaactctatattcatcaatcatcataaagaacagtgccagaatggtcaaaatacatacataaatgtttcttcatagactctgctcagatctaaacaataaattatcaaagaataaaatattagagaaagaaaaaggatggaattcaacagaccttcccaagtagcgattgcacgctccattccgtaaatcatgtggatgggtgcccattcatccatatcctctccccaaatgaaagtgttcttatcaataatcccagcaccccatgcagttttaagcgtaatcaattctaatggtcctcgagtgcgacccagccgatccttatagtaccatcccccactcctcatgataactaaatcagttcaaaaacagaaacaacatcatacaacaaacaaccaaaactaaatcaatgaacagacacatcaattaatggattattaaaatcaagtgattgatattttaatatcgcaaaaccttcaacaaacaaagataatcttgattggatatctcacattcaactcccatgtataaccacaaaatgttcacaactatccattataatttatcaatatttcttggcttgatgtcacttttggtctataatggtttcgtagttggttcactttggtatattaagttttaaaagtttcattctggccctttaagtttcaaaaatattgtttgggttccttttttatttt

SEQ ID NO: 5668 - DNA, 821 bp, Glycine max
ccagcttgcatgcctgcagcttttctatctggataacactcaaatggtcctcttccataccaagttacttgatccaaagacttttccacatttaactcgattcccacacgtggcaaaggaggaagatcagggtttggtttcacattgcattctataatgacatccccagaagcataaattgtatatgccatttctgttgtaaataaaacctttgacttgtcttggttggagagagaaccatcctcgcccttggtaacaccaagaaaaaccaccaatattctaactgagttctccgtaatattttgcacagaacagctctcagtaataaagtggaggcagtccattccagctgctttccacctggacaaataactggctgaacctcctcctttgtcattatcgataggagctcgccagaaacatgggaggatgccctttttcataacatgcactcctttaacctagcattatattaataccaatgtttaatcaagtcaaaaagtcatacaaaaatttgaaaagagacatcatgaaacttcattgaagagggaacttaaaaaaataaacatataaaaattcccaaaattatgacgggtttccgcccttcaaatatttattaacttgggcgcttgtttcaaggtattgtcatattcccatgtttggtacaatttttagaaaaacattcccaggaactattgattcccaggaaaacaaaatcttcatatttaccttgcttcacattcccatggtgggaaggtgggtatcttagattcccacaggaatgaaagttattttctacattaactacccctctccacttc

SEQ ID NO: 5669 - DNA, 865 bp, Glycine max
agtcgacctgcagggcgacgtggttgggttggggaaggcattgtcctctgacaagatcgttgagccaaggcgtgcccccttgattcctggcatggaggctgtcaagagggctgccattcaggccggtgcttttggctgtaccatcagcggcgccggccctaccgccgtcgccgtcattgacgacgagcaaactggacacctcattgccaaacacatgattgacgcttttctccatgttggcaatttgaaggcttctgcaaatgtcaagcagcttgatcgccttggtgctagacgcattccaaattgaaccttctcttctctatctctatggtacgcttcacttctctaccgcttgtgtttatacttttactttcctaaggctatgattttgcccaatcttcacttttctcctaccgagattcatacgacaaccaaggccttttctatttctaatcttctcagtttattgctacttttttaactagccttaggatttcacaaggtctacctttatatattcattattacttctttcttctcaactcgcccccattcatttcttttctaagcttcttgaaattgattgtgattttctaattaaatgcatctcacggccttttcttatttgtataaatgtttttaacaaacaacatggttggttgacaattttgtatcagctactgaattctaatttattatgcttgccagagaggcttgtagatttcaagaaccggatttcttccaacttgctcgtacactctaagtgctgaccggtcacatgtatttgaaatttgatctgatcatgaagcagcattctagtgtggaggtctgaataaaaagagaacattaaacccagctgggagct

SEQ ID NO: 5670 - DNA, 799 bp, Glycine max
aggtttagggttaatctgatcgttccacctcaatttctccaagaggatgatcggatcatggatcgcgttaatcctgaatataaagcctgggaagtgcaggaccaaaaattgcttgtttggcttcagttgacactctcgaagtctgtcctttcccgcatgctaggctcgaatcacttctatcaggtatgggagaagattcacgagcattttagtctttacaccaagtctaggccacatcaattgcaaacggcaatgcgtgctgtctcactcgacgggaaaacaatggacgagtaccttcacaaaatcaaaaactatgtcgacgagctcgccggttttggagttccagttttccataatgagcatgttgatgctattcttgaaggtttaccttcggattatgcaccagtggtttccgcgattgaaagcaaaaagcgcacgccatctattgcagagattgaggctctcctttatggccatgaaactcgcctagttcgatacaatcgcgacacccaactgcttgtatctctgtctattaattacactcaaggctactcatatgaaagttcgtccaaagctaatgattccagcagtttcagaggaagttatggcagaggtaatgggtggtcgcaatgctttgtttgatcgaggtggtggtcgccggggttctagaaaggccacagtggaggcagatttgctactttcagtgtctaatctgcctcaggtatggtcacactgctaatgtggttccactttcggtctaataatgaatttttaaccctcatggagtcattcacccttt

SEQ ID NO: 5671 - DNA, 862 bp, Glycine max
aggtcagtgtttttttactggtggtttggaagctcttgttcttgcttaatctgtaatgagtttgcgattgtgcgcatttgtcctccatttgttttgatggtttcaaaatgatcaaatttggatgctgggaggtatatttatgtatggtctatggggttttaaattttgcaagttccaacccttggcaaacatccctggttgaaatccatgaaactcaaatttgaaattcatgacattttttttctaaatccaattttgggtattgcaggttgggaggagaaaatgaagcaagtagtaggaatggtggtttccaataagatgcagaaatcagttgtggtggcagtggatagacttttctatcacaaagtctatgatcgttatgtcaagcgcacctctaaattcatggctcacgatgagaacaacctctgtaacattggtgacaaagttagtagcatgaacttaccaatttaattggtttattgttcatcacttaagttcttgtgcatgttattcttatgatcttatcacttaatttgtactcttggttttgcccaaaagttaataaatctatcaattttaccttgttgtttaggttcgactggatccttctaggcctttgagcaagcataaacattggggttgttgctgaaattcttaagaaggcacagatatacgttccaccctccacccctgtgtctgttaatgtcaactccagctctgtagcaccagcttcataaatttgttcaagggtctgaatgtatgaacttaattctcattttgaatgcatcccatcaggattgttttctgttagggatttatattattccccatactcgtggaaaaggtacactgttatgggaat

SEQ ID NO: 5672 - DNA, 864 bp, Glycine max
ataaataaattaacttaatgaaaacataaaatattatttatagttcacaaaaaaataaaaacattatatctaaaagacggatgtgaaagtgagtatatttatattttatatagataaataattaagtagctaatttctgttttcaactttctagtttagaaatatgaaggaaacaattatgatatcttctttctctaagaaatagaagcggacaaagataataatttttattacttacaaaacctttttgtatttatgtaaaagtcaaaatagggaccaattaataaataataatcacaatttgcactacctaggattacaatgatgcagagaactctagccatagaaaagatattctttctattgaatttcaacataaaagtgtctatttttttaaaatattaattttatagtatttttaataaaataagttaaatagttttaataattaagatttcatccaataaatatatcactgaaataccatacaattgtttcagtttcgcatgcagaaaccgccatttctgtgcagaattcgaaaatagcaacacgctgagctctctccgcgaggttttctccgatcaaatgacaccgtccgatcagaaaccctaggagccggcgaggcgaggaacctatcgggcatgttcatcctaatcgcagcggcggcgggggcttaatggcgagcataaagttattgtcggaggctgtgcgtagctcactgcgttcgggcattttcctcgtcgacttcacgcgtgtcgtcgaggaactagttttcaatagcctcgatgctcgtgccacaaagggagagacaagagagttaaaagtcattagctttgagaatttgggtatacattgagctgtctg

SEQ ID NO: 5673 - DNA, 857 bp, Glycine max
ttcaaataaattgcaagttaaaaacaataaaggacacactaaaatataatcatttggcaatattttgaatggatcttaccttcattccagaacctcgcatgctgaatgtctcccagggacttttggcattcattgcatccaatctgttaatgctcatgttttgttcaattgtaggagtttttggttcaacaatatcaagtggaatgggctccttttctggtatctgcatgcatgatggggttgaagaatatagcattttaagactattagaaagatcccgcaactgagaactgataggtggtgaactaatagtagccgatgaatgatctccaattgcccttgaattgttgttctccttgttcatgctatggtctgtaaatgacaaaaaagaaaaaatcaatgtagttgtgtatcattcgatcagtcaagcaatccctcgaaagtcatcacaattaacgaaccttcctgaactatttttgacaatgcttcagagtaattactagcataaggatccttttgatgatcctcttcatccaccaaaatgccctacataaacaaacaagcaggtacattattaggtgtcttctgtacttaagtcaaaacattctggtatcgaccatgctaacgtttttgtaccaagaaggttttgataggttttaaaaatgtctaactgaaaaaagaaaaaaggaagatgtgatagcattgataaaattacttcatcagcaagggggattaagttccacttcaatgttagcattcaaagatgaatcatcctgtatagagtcatcctgcatatgtttcccggtctcactagcttttgaaaatgagtcattctgcataaaaaattttgtcaatct

SEQ ID NO: 5674 - DNA, 853 bp, Glycine max
cttctgtagagtcgacctgcagttatagtagacaccccaattttgaaagtctcagctaaaagttgtaaaatggtagaaatgataggaaaaatgttgtaatgtcgtaggcgtgtgacatgtcaacgcttgaagtgctccggaatggggaattactagaatcgacattgacacccttgaaggcacctcttctaagttttaatagtgtttggaatgtttggctagctctaattaaaacacaaatcatcatcataattcttatttaaggtcatgtggggcttcaaacgttgagcctggacgttaaacaccaacaaggaaaatttgaggcgttgcaccaaacaatggggagcaaacttttgaggcactataaaagctaatgttacggtccagcagaggagtatatctccatgcatgaaaaacctagtttcccaataaatttattgacgactcaagcctccgagagaagatccttgattattacaatcactttgatccattatatcatcttattttctattgtttctattgcaatcaatttgatccattatcatcttattttgtattgttagattctcttatgttagggatagataaacttcatgggaatcacttgaaattgcatcctcttttattcaatgcaagtcttatgaccatgagattaaattattttttttctttaatgctttttgctaattggtcattagaatgattaattaaagttgtgtttataatgaccaatgttgtatatgtagttgcaacttagattgagtgttttatatttggatgagtctaagaataaaacttcttaatgagtggggtttttttttaaattctaatataatggttggattaaata

SEQ ID NO: 5675 - DNA, 796 bp, Glycine max
taactctctaattctaaccatatcaaacctctcctaacttaagtgtggtagctagcttggccatccaaggaaaagggtttgtacacttactcaagatgaagatgaatctgccacaacagtttcaacaaccaaaaatacagtttcacttaactcgtaacaaaccattcttttctaacgtgtgtgtcacgtgcataccttacttgggaccctttctaaaatgctaaggtaaaatgtccgtgccagaattcctgtttaggactatccatccctgaccctatgcatggcagcaatgcaaccatacttcaaagcatggtccacacactccacaacctgttatggggggttgactctaagttgtaatccattttaaagttgttttcactttccaaaaagaagcaatggttgcattttcttataattttactcaaggtagctcgctcaattacttgctaaaacttaaaaattagtaagacactaataccgaattaattgaatatcgaatatgaaatgttatttttttttatcttgaaagcaaggcacctccactaataaaagccatgagaaccagttaatagatttttttttccacacaaatgtcgctctattcgtataatcaagaattgaacttctgtcatatagttacacgacccatgctattaaccacttctatcatactttatgggtatgtgaaatgtctattgctagttcatatgaaatgcccaccaaagagtgaattcatatgaatttacttgtctttgaagaataataatcgcttaaaatcttgtatccaaaaaaa

SEQ ID NO: 5676 - DNA, 870 bp, Glycine max
cagcttgcatgtctctgcagaaattaacttctgtataaaacagacaacaaggatgaaagtctagactgcatggctatcattgtaagtgtatacgagtaactaactcttgtagtcagttgacagttagctttagttagtcttcagttacaacttaatttcagcagtataaatactgctcttctaggagatctcagtggcttttgtagtattttctaaggtcaatatacaaatcccttttctcctctctagagtttctacaatcatgaaccaagtatcccaaaagtttcattgggggaaaaacacgagtggtttataaccaataatttcttatctaattcactttaagttgtatcgctaatattttttgttcaggaaagcacaaaacaagaatcacaatttggtaatcatggtcagaactaaaaaaatccaacttaggaacattaaacattttagtggttaatgtactaatctcgtgccaatttaatcagttaaatggtcaatattcattaattggaattttttttaccaagatttattaaattttaactttcccaatcataagcaccactccagcattagctatactgagattcatttaaagaaagagtctatagccaggttcaaatgacaaccgttgatgcggataaccagcctccgaggaagggttagatcatcccagacataatcagcactacatgcaggtccaagaacctctggctccaacaaaccctggaaatttctcaaatgatgtgatgggaaaaagggaaacgattaaatgaaaataccaaaaagacagaattttatgcaaccttttgatagtaagttattgatagactatgcaaacaattctcaattcgataaggcagactc

SEQ ID NO: 5677 - DNA, 854 bp, Glycine max
  misc_feature (801)..(801): n is a, c, g, or t
agcttgcatgcctgcagaaactgctgcggctcttgcagttgcttctctggttttcaaaaaaactgatcccacctattccaaaactttgattaggagggctatccgtgtaagcatttgatttgtgatgaaaatgtgattttggatgtaaatggaattctttcaactaatgcttaaaatctgataatttacttgtttataggtataggttttccagtttgctgataaatataggggaccctacagcaatggcttgaagcccattgtgtgccccttctattgttcttactctggctatcaggtaaagttctaatttttcaagttgcatatttgatgtgtaaagtaaagtaaagcaaggagtgtttccttaatgatgctttggagaatgtcaggatgagctgttgtggggtgctacttggcttcacaaggctactaagaacccaatgtacctaaactacattaaggttaatggaaagacccttggggttgcagattcttacaacacctttggatgggataacaagcatgttggagcaaggatactgctctctgaggtttgaattgcctctcttttcatctgattattgtcttttgcagcagagctggtaacaaaaaatgtaatggtttccaactcaacatttgtgttcttagttttaggaatttcttgttcggaaggtgcaaaccctgcatgactacaagggtcacgcggacaattttatctgttctgttatccctggctcctcttcttcccaattcacccccaggtgagggttctctttttcttttcttactcttcttaactgnggtctaatgggtagctgttacctttggttcctggttctttaaaaactacgcag

SEQ ID NO: 5678 - DNA, 792 bp, Glycine max
cagcattatgtagtacatgatgatgagcaggatccagcacatcatgcacagcatcaggaattattgatccaagaaaaccacttgatctcttgctactgctgaagtcatcaaatatacataagctgacttcccaaatccacttcagaggaatcaaaataattaagggaaaaaaatatcacatttttttcaaagagaaaaggaagcttgtccaaaatcaaaattatatggaaaactaaaatcagctacagcaaaggttgcacttgtacacatttatcacgcaataattaataggacatccacatcttccattcagtactatttggtgactaagtcaaacgcaataattaatgtttgctttaaatttaaatcaggctggctttaccttcagtaatccacagcaacctaaatttacatgacatattaacttgagttgagtagaacaataaagtagtctaatagatgggaaagagggggggaaattttaaataccttggacgtgaagcaaatccaagagtgaaaagatgaatagaaccagaagaacttgaggctgcaagaatatctggaagccgctttgatggtccaaatgaaacagaaaatatagtagacggatatgtcccccttctaaagctatatgactgcggagaaaacatcagtctggttctacacttgatgcaaaattgaacacaaaattaaaagataaaaaacggctacaaggtatataatcaatccataaagaatataactcatgtatgaattacttcaaagatgacgatggaaaacaaatataaagag

SEQ ID NO: 5679 - DNA, 841 bp, Glycine max
tcccaaatgatgtggtacttgaaaattttgaatcctgcataggaagttgattatgaaaatcatctctattgagattagagcctgaaggcaattgactagctgggttcccctgagggagatgctttggagagaaaggttctgtaagcatgaaaattagtgaatgatcctgcattggagggtatgcttgatcctgaaattcagaattctgagaaccagttggtaacccagacttcatggaagtctgagaaacaaagtcagttcttgaatgcaattgactctgattgaattcagaagaaatatatgattttacaactcctgagtttaaactggaattatacaccgctcttggtggtgggcctggtggcggtggtggtggcagtggcaaggatgtccaagagctattaggtggtacattgaagtgagcattctgcatgtgtaatggagctgggtaaggttcaaacttttctctcgtagtggattggaaaggaaagaattgactttgttgcattgcaccataccgccttgaaatttgtggcatatgcacaggattttcaccctggaaatgtgaaacagcagaagctggcaactggtaagtatgaagcggtaattccccagaagaaccactctgtggaggtaactcttcaaaagcctcagagtgcaatgaaggctgctctgatgtgacacattgcccaacagaactagtggctgactgttgctgagttgatgacaacaatggtaacagttcactaccaggagcttcattaacactagcagaaacaattgatcttttatcaggtgatgaatcagtcacaaaggatgcattcacatgctgagacatgtc

SEQ ID NO: 5680 - DNA, 821 bp, Glycine max
aaatgcgccacctccgacgatggaaggccgctgaactcaagcacgccgtccaccttcgtcgacgcccaccccctcacgtgccacccctccgactccacgtgacccatcttcttccccctgtacttcacccctacgtcaacgtccgtcagctccatccagtacatgcagcggttctgtaccctcaccgacagcgatatccacacgtccgcgctcaccggcggtatagggtgcaccttcacgcgcttcacgttcattctctcgatcttcagctctggctcccacggccataacaccaacacgcccgccagagacaccaccacaaacaccgtccatttcaggcagcaaaaccgtctcaaaaccacgcagtttgatgagaatgccttcaccatcgctgcctttagttttaacttcacatgagcttcactgtctaattatctatatatatatatatagttgggaggttctaaacttaatgtttcaagaagaaaaaaaaaatgatcaaatttgtttcagcttaaacgatagtcggattgaatacgtaattattatgttgaatacttaagaaatttttttaccatctatttagaattacctcaagaagaaaatacataaaaaaatattagtaatatatatactcttttaaatacattcttcttaattgaaatttattttttaaaaaaatttatcgattttttatgctttggttaataaatattttatactttttagtaaattttaatagtgttaaaaatgatgtgctaaaaatatattcctaatactttcttgaattaatggttttcatgaactttgttgtattggaa

SEQ ID NO: 5681 - DNA, 847 bp, Glycine max
cagcttgcatgcctgcagatcagttgcattaacaaaatagcaatcaatatctcatggtttaagctaacagatacatctaaatttaaaaccaaccacagtgaaaaatttagaacccaatgtataaaaatgttgtgcatagcaagcatgcccaaacacacgactaaaagacagtccacaaattattgctatggacataacatgaaattataacgcaagtttaaatttctttttagctgctgggaatccagcaataggttaactttgtttctaagatagtaaatgcacaacctttaatacaagagggaaaaaacatgaggctaatgcatatatatcttggggtcccaagctcatctaggatctaccttgctcattgcttcaagaccaaaaataaaatgtgaaaatcacttacaagcaaaccagcaaggattccacaagtctctaaatttttgtcagtgtttgacttggcaagcttcataaaactctccatcatagaagttgactgcacattaaacaattatcaggaaaatagggaatactgaaatgaacctaaaaatgagtgtggagaacgagagaaaatggcaagtgatgaattctgtgtaaaattacaccccagagcatatatttatattaagggccataaatacaagaatatgtagtttcccttaacataattgcataacaaataatctgtcctatttacattgttattataattacattatttctaatactccaccttaagctgaagcatataatcatacgcaccaagcttgctacatatataactgacttgagtacctctcaatgatttgggtgaaaacatcaccagatcatcatttgaattgtc

SEQ ID NO: 5682 - DNA, 840 bp, Glycine max
  misc_feature (771)..(771): n is a, c, g, or t
  misc_feature (804)..(804): n is a, c, g, or t
  misc_feature (817)..(817): n is a, c, g, or t
tagagtcgacctgcagtggcaaatttccagccatttgaaaatgtaaatttaaatgtgaccccatcaatcaacgaggctgtgaattttaatgctactttgtattcaactgtgaaagaacaggaactaatagatggagtggcatataatgtctccaacagccaaatcagtgaaaatccatatttggagtctcagaagcttctcataattgtaaccccaacacacaatcatatatttcaagcatattatttgcatcgcttgtcgcagacattaaaattggtcccacctcccttgttgtggattgttgttgagatgacttcccaatctgaagaaactgctgacatcttatggagtagtgggattatgtacaggcatctcatttgtaaaacaaatctaaccaacccaagccataggagcattcttcaaagaaatgttgcaatggcacacattgaaactcatcgtcttgaaggaattgtttactttgcagatgatgataacatctactcagtggaactctttcagcaaatgagagaaataaggtctttctagtttccaagatattaattttgttagcacctgtctgctttgccttctctttcactctagcgactcggatgcaatttatagtcaaatgtttgtgatatgtaatttattgaggcaatatggataagatacagcaattatacctgtatttaacttgctatgaatttctgattgtcacttctttaagataagagacatgggtctaattttgtctgcctaacctattgaagngagggtatgggggagggtcattataagtgttgntgattgactgggnggcatattttaattttaatcaat

SEQ ID NO: 5683 - DNA, 836 bp, Glycine max
tacgccagcttgcatgcctgcagaacacaaagttgatagcttgaattttaagaaatattatgttcctcacctggcaatcaactcgatactctattgtattcatcatttgaagctctgagagtatagcacgccgttctttttcaattctagaagcaagaaactttgggtggaaagctatctgcaagcatcaataacaataagctgtgagtaaatgccaacctagaagtactaaagcataagacctagatcagatgaaagaccaccttaaagcaaatatatacatttgtacaaaataggaagaggcttatatagcaatggcttgaaataaagcaaagttcaataaagcgtacctcattcaaggcatctagaacaaatggaagtaaatcaccatcagaatcctgacaaacaacacccattaataatcaacagcatcaataaaatatcaaacaattcaatatgatttgatgcatatatacatatattggaaataagacatacatgttcactttcattttagatgatcagtccaagtaacaattaagcagtaaagaatatgaatcccagtagcaagaggctgagagatttaagataaaagcagagtacacattgggaaattgtaggcagtttaaatgcgccaaagaagaattttaacacataataagcagagtaaacatgactgtcagatttctacctttatggttgttcagttgccttaattgcagtccacccctagcctgtcttaattgcggcctctttgggggctgccttaattgcagccttaaggtggcgtttagtcccacatcaactaaatgatttagtagagctataaagcttgg

SEQ ID NO: 5684 - DNA, 846 bp, Glycine max
aaggatgaaaagacagcatttcagtttagtgtgtctaataactggaataagaatggcaaatatttaagaagagcctgagaagacaccagctgtttccttttttaagcttagttacaattttagtcctagtttcaccaaaaatgactttggttcctctagttccaattgctacattaccctgtagtttctgtatgtaagcaatcaagactcgtcacactgcttttgctcacatggctttaaatttgatttcttactcttgtaatattaaatgtgtagcaccttggttatgtgagtcatcactgtctcccactctaaatacatttataaagctacacctgagggctgagccagtacagttgatggtacaaagaaagtgaaaccctagggaagcactaatcagtttctagttttgatgatgcagagtccatgtgccaaaaatgacccattagcaaaaatagccacttcgaacagattatgggcagggaagcataattttgcatcaacttataaacccaggagataacattccaaattaaattaagggggctaaatttgaacgctcctaacactggagagatcaaaatgcaataaacttttttcttactttttgccaactatagctaataagtcataaagtatcaatatgcataacattcattcacatataaaaatcaatttgatgtatcatgctcataaagaaattaaaaaaaaaattgattaaagacattttgtttaacatcctaatccaaaattcaataattgaaaattattgttgcaagaactctccaggctaaatcacccaaggggaccaaagaaatgaaacaaccatgaagtaagaaacatgct

SEQ ID NO: 5685 - DNA, 857 bp, Glycine max
acacttaattggtaacatttattaatcgttatcattaaattaacaagcgagttataatgtagggcaaactaaaattgcagacaaagcaaagtctcacaccaatgtaccatccttatacgattaattgatatcaaacactcaaacagattgctcctaggcaggcttggtttgaaatagttctcgcgcagggttggtcgaaatgaaattctctcggttcaacattctcaattttggcatatttttggaatttcttaggattagtcatggatggtttacaaatgtgttcaataaccagtcaacaataaccaccaattccatccagcaagttgaacaactttcaaataaaaaaaaaaaaaacaggttttctttttgtaaagatactacaagggtgagtgatgagtagctcactacttgagggctaatgttcaatgaagcaaacaaagttttcacaataagaatgtcatcacaaaatcacatacaaagtaatatgcttttatgttttttcgtcgtcagtttcgtcaccatttaggattttaatgttatgggagtcaaggggtaggaagctgataattgctctgccttatgctttgtgaatttttttgttgagaaaaattgatgagaagcccttcatcatagaactaaattcggaatgtatcaaaatgaaataaattaatagcgtacatctagatgtggttgcagtattctgcattaagatacagtttctttcttgtacaaagcaacaagcatttttatatttttaatttggaatatcatgatttgtattaacgatttagatttgatgtgagtctttagacgacatacaatgtcatggatcccgtcatatcataggtgtgcgt

SEQ ID NO: 5686 - DNA, 834 bp, Glycine max
gtgaattaaattttacttaaatgtgctccttaaaaaatgagctaaaggttttttattgccgttggattttattgatgatctcctttggatttcaaacgcttgttcacttctttcgtggttgtaacgttaaattatggtgattgattgtagggaacaacataagaagctcgatgcaattgagacggaacttgctggagctagacaagagggttttgtttcaaaacccttgataaagactaatggaacttactcaatgagaaggccgttggtcgtgataggtatactgacaaagtttggtcgccagaagaatagagatgcaattcgaaaggcatggatggggagtggtaaatatattcttgctttctcttccttggtgccacatgtcttgagtatacatttgcctatgtgttggtttcaaaatgaacaaaatagcagtaaatatgaaatttgatgtaaagaatttatgtgaagcctgaactctacacttctgctgcacagcacctgttgataatgagttaaggtacagataaagaaacaagaggagctttcaatttttacttttctacctctaaggagaatgctcctatcttcgtttccacactaaaaagaagagtcagtatcctcttgttgatgaatttaaattcctttaatatctggtattgatcatgagtcaggactcataagaaaactctataatgctattgtgttttatagtatatcacatgtaatgatttatttcattgattttgaacatagttatatctagcgatcatggattttttttttcaaaatatcttgctttataagtttggttaacagcttactgcactagaa

SEQ ID NO: 5687 - DNA, 875 bp, Glycine max
agcttgcatgccttcaggtatgaataaattatacttaaatgtgctccttaaatgtgctcctaaaggtttttgattgccgttcgattttattgatgatctcctttggatttcgaacgtttgttcacttctttcgtggccgtgacattaaattatggtgattgattgtagggaacaacataagaagcttgatgcccttgagacggaacttgctggagctaggcaagagggctttgtttcaaatcccttgatagagactaatggaacttactcgacgagaaggccgttggtcgtgataggtatactgacaaagtttggccgccagaagaatagagatgcaatccgcaaggcatggatggggagtggtaaatatattctttgctttgtcttccttggtgccacttgtcttgagtatacatttgtctatgtgttggtttcaaaatgaataaaatagcagtaaatatgaaatttgatgtaaagaatttatgtgaagcctgaactctatacttctgctgcacagcacctgttgataatgagttaaggacataaggtacagataaagaaacaagaggagctttcaatttttatttttctacctctaaggagaatgctcttctcttcatttccactctagaaagaagagtcagtattcccttaccttaatatctggtattgataatgagtcctgactcataagaaaactctataatgctattatgttttatagtatatcacatgtaatgatttatttcattgattctgaaaattatttctagctatattgaaaaactgttttcaaatgtatcttgctttaatagttagtttacaggcttcctgcactaagaatgaagtttaattttacattactatcttttaag

SEQ ID NO: 5688 - DNA, 842 bp, Glycine max
aaaaaataatgattttttgttgtgtgaataaaaaataatgatatttatatacctctaatataccttcacctctctattcaaatatatatatatatatatatatatatatataccttcacctctcttctaccttaatttttcttgtcacatcctattacttattccatctatcatttgtattactttgctgtttttaatcttacactgaatgcgtatatatatatacagcatgagtataagaatgtcaattaatagatattggtgaaagtttaatgaaatatgtgaattgttgtatgtcctaagttatatatatattatatttaagattaatagtctttcaaaatttaaaaatgtaaaaattgcaaaaatattttttatcaaatgcaattaaccagtgtaatatagaaactttcatctcattttttttcaaaaaatattctgaatgtatttttaaaatattgttttctcaaaagctaaaacacagtagtttttaaactgatcacacaatattcataaacacagtagtacataaaattctaataaaacaatttaaaacattatctttctccaaaacagtttcaaagtcaacgagatgcatgccataagttggaatggtactttttttttggtgaatagttggaatggtatttccattcttaattaatatgtccaaaagaaaactttgacactgattaattaagtttcattcactagttctagttttctactagtctcaacactgaattaattttttggtaaaaaaaaaccctcattaaattaaacttagagagctttttattttacttacctgaagaatttccttaataattaaaaaataagct

SEQ ID NO: 5689 - DNA, 854 bp, Glycine max
tgtcagtgggatatgtgtgaggaagaagaaggtcttagtggccccaaaagatacaagggaaaacaagaaaaatgaatgttacccagaacaacacttccattccaatagacaaataaaagaaaggccaccaccaccatgagatagggactaaatgaaattaaaagcttccacttcatgtaccataatgttaaaaggatggaccatatttcatgagcaaaacctgcaaaatgatagcaataatcgtgtcctatatatgttgcagaaagttgaaggagtgggatgggattaacttcttgctccctacagttatatagtaattttattttcttaggagcataaaataggcttcatggttttcttaaacatgtgaaagcaaacctgaagaaaaggaagaagaagcatgtgaactagacgacgagtgctcaacggtatccctagatttaacaattcttcgtcttctcagattgaaaccctctgtatttgtaccagtagcatatgccaacccatgttggatagatacatccgactcagcagtttttgtatggtgctttgcatgagtcacagaaatatttatgatcccagagcatgcaacaaaaaccacccatataatatttgtttgccgaataataactgcaaacgctccaatctatatgaataaaatttggcgcattaccatcattataaaatagaatgacaattataattatctatgtatgctgctaaaagtatctgtaaacctatacatcaagagttctgttgtacagactaaagtcagaaaaccaagagattaagtgtgcgtgtgtttgtttttcagattttaaaaactattttataaaaatgatttcaaaactaaa

SEQ ID NO: 5690 - DNA, 823 bp, Glycine max
atcttctaatttttgtgctatgtgtatactgagttttgaaattgcttccctttttttttgcaccagctgggttccatctatggtatactctggtgtggtgggtgaaggatgggtctgtcccaaggatcttcagtgtttcttgtgtgttatttagaggctttggcaccaatagagatgctaaaaggctttggaggttttctcagtttgtgatagtttggtgtatatggttggaaacaaattctagaatttttactggttgagttctactacattagatttcatttgggacagagtggttcttctatcttctttgtggagtcatgacaaaggtctctttaaggggatgtctttggcagatatacagggagattggcttgctgtacttcatgttagtttatgttcttttttcttttggtgtaatttttagctgtagaagatattttattctcatccctttgtatttcacctctcttcctcaaaaatattctttttttataaaaaaatgtaggttgcttgaaattactggtttcattatgtaaattgcacatagaaaccctctgggtccaccactagagaagaagaaagtaggatgaaatatttttcaaatgttttttggtttctttccttcttggcttctgaggatgatggcatgtgtggagtaggtggtatcacatggcaaagaatacctcatttcctttaaattcattggtcatacaatagtcttacataatataaaaacctgaaaaaaaaatattagaagagctatcaaaatttcaattgacattgttatcacattcttaatcagcaaagtttaataaatcct

SEQ ID NO: 5691 - DNA, 644 bp, Glycine max
  misc_feature (281)..(281): n is a, c, g, or t
tgggaatgtccgtggatgtaacttacagtctgaattctgcatgctcttgtttatctaatgtgtgtaacaagaggtaatttgtcacttgactcactttagcagttgaaattaaaaatccaaatcagttgacagttgcacacgataaaccttaaaacttacctatttaagttctgtcattcttaatagcataagggcactacccagaatatttcatgtgtacaagtcatatactatgtaaaatgatttcagaatataaattatctttatacctgcttatgtgngagataccacaacaaagccttatcccactaggtgagattggctacattgttgtggtattccacataaaataggtgataaagataatttatattctggaatcattttactcagtaaacaacttgtacacatgaaatattctgggtagtgcccttatgctattaagaatgacagaacttaaataggtaagttttaaggtttatcgtgtgcaactgtcaactgatttggatttttaatttcaactgctaaagtgagtcaagtggcaaattacctcttgttacacacattagataaacaagagcatgcagaattcagactgtaagttacatccacggacattcccaatctctgcaggcatgcaagct

SEQ ID NO: 5692 - DNA, 867 bp, Glycine max
aaaggtatgtttcttatttgtgatcatctagtatactgaaaccttaggttttgcaacagtatgcaacttgatcttttcttttgttattcaatgtaaatatttcttagtctggtagttcaacttcaatatactctgtagtctctgcctataggatcatttgactcttttttttctatcaactaccaatgaatatatatatttgaactggaatggctgtaaactttttcacttttgtttgtggaaatttagtaaccgaagatgctatcattgtcataattatgtaagtattgatttgtagataaaattcttcaacaatagatacacgtgcagctaatgttccactcttaagtgagcacagttcagtagaaggttttcttgagggtggaaaaggggagaggaaagcataatctgagactaaccttgactgccaaatcccatttggcattgatgtagctcaacttcttaattaattgcttgctacagaaaatatgagagcaaataagcaaagaattctctcttctatttttcattttatctttcctcttcatataatcttcaggtatttgtgatcacatgatggttaaaattgacttaaatatggaacccatggaaggctgattgggacttggttgtttctcactgaaacttgtattttagcaattaacaagcatgctgcaattgaatctccaaaagccagattcgctcattaacttttcagattgatgttatgaagttaattgtgtaacctttatatcccagaattgaacttaatggttctttggtccattgggagtttttgcttaggtgactcgagtctgatctggttttgttttagggtgtatgtttgaccactatatactacatgca

SEQ ID NO: 5693 - DNA, 900 bp, Glycine max
tcgcttttcgcggcaccgcgacccgcgccacctcttcagtcttcattcttctcacttcacgaatcacgaccgaaccgtgaaaaacgttcccagcctcccaccgtgccacctcttcaggtcttcattcttcctgctttttgcaatttaatgtttcttttccactactttattagctttgaggctttctgttttgtaccgtttgcttacttcttaattcagacattcttgttcttagcatctgattaccatatttgtagttatgtcttgtttcttttctttttgatgtaatgattgtatagtattggtttagtgctaatttagctgcatgatcagagtttcacatggttaactaccagtttattctccgttgacacctgtgattgtagttaattaattgctacttaatgtgctattttttttacaattttaaatttaggtgtaaaaatggggttatctgccaagaaatctagaaaaagaggaaaaagggacagtgattcagatgaatacgataatatggagtatgaagaggtattcattgctgcaaaattttagattttttaatttgttgtttaataattatataacgttagtgatttccttatgaattttgattaaggggttgttttcctgatgtaggtggaggatgattacgatgatgatggtgagggaggaggatgaaaaaggaagaacatggagagggaagtaacagatgatgaagatgggacaggagagcatggtgaatgggaagatgatgagatggaacagcttgagaaagataatagagatcttcatcaccaggaagctgtgagattccatttaacatttgatatatatttagtttatattgcatatgaaaacgtcaactatattgctatattaacatttcggaatatgtcacta

SEQ ID NO: 5694 - DNA, 826 bp, Glycine max
atcatgtacatgaaagagttcaattagattcaaacttcaaaggcaaagtgaaaaactaaagaataataagattggtcttttatgtcaaatgcaagtgtactaagaaatttgcttttttattttaaatattcaattcaatttgtattattattattattattattattattattattattatataaccattgaagtttatatttttatattctataaagtttcagatgataagttcaacttcttaaggttactgtttagctataaaaatattgtattattttgaatagagacttgtattcctctataactgatcaaatgtttctattacaattttatagatctttaaaagttttttaagtatgcccatgcatgtatatcaatcaaattggccgaatgggaaaggtaaattacctatttattctattatagagctaatctacatctttatataaactgctatcaaattccttttatgcctttgaacttcatggaagtttatgcaacaaaagctttacataacacattagaattgcttgctttcagttcatggaagtagtaaaaaacttactgtaagcaattaagccactgatagggaagctatggaccttgttaaaacatagtataagacttaaacaatcacaaaatggagatcttggtagctgtttatacctgtgcaaagggttggtgaacatgttcatgatggataaatggcattccagggcgctgacagggatactgagatgaatgcagatacatggctgatgatgagtgtgcaccaacttgattaggattaaatgggggcatcatggtctcgggatgtccatat

SEQ ID NO: 5695 - DNA, 835 bp, Glycine max
  misc_feature (742)..(742): n is a, c, g, or t
  misc_feature (774)..(775): n is a, c, g, or t
  misc_feature (782)..(782): n is a, c, g, or t
agcttgcccacacgcaattttctcatttacctcactctcgagacaacggatttgcctcgttgcttcaaaactgtatcatttaagatgaagagaaatacttgtaagttatatctcagccttgtatccagaattccaggtgtgagatcctatctagaaaagcactcagaatttgatatttcttacacaagttaaatggccatctatcaaacctaaggataacatgatagcaagcagattggggaatttataaagtttcttaaatacactaactgagtcccactagaggatatttcttaaacaagttaaacgccccactagaggataataaaaaatatcacaagatagtttcatatattctaataaaataaataaattacaaggcaaaagcctaatcattatatctatttacataagattgagtggatacttttacagtttaacaacacagccatgaggcccgggaaaaatcagtcgtggttaaaacattctaggtagtaggttcttaacaaaaggaaataagggtagtggcctgacttttcgcaccagttcctttaattattatctactttttttcatgtgttttctctagtacaaaataaacttactagaccagtcattgctccttggttctattcttataggaaaggacagtgtctccatttgcattcacaattgagaaaactaaaaataaaaataaaaaataggaataagaaagatagttacccatccatttctggcattngggagatccatgaaacaagcatcaaaatatgnngggcagnttaagcatcttcagagcagccctgccactctccacagcagtaactttagccca

SEQ ID NO: 5696 - DNA, 875 bp, Glycine max
tagagtcgacctgcagtataatcctgataaagggaattatgaaaaaattggtgagtcaactgaagtggcactacgtgtcttagccgaaaaggtccgtatttgtatctctccttgtgtctcctatgtgtgaagctccgtcattgctcaagtatactttgataattccttatttgtaggttggtctccctggtttcaattctatgccatcatccttgaatatgttgactaagcatgaacgtgcttcttactgtaaccattattgggaggaacaatttagaaaggtgagctttagctagtttctcacctctattttccatttatcttaatccgccaagatattttaggtaagttggattttgaaaagttgcaggttttttgaaatattcttgatgcctattgatctgaatacactattatacaagaatggtttcatttaaaaaaaagggaatagataaatgctaataaaaaactataagttatacaccaaattgagatgggtacgtacaactaatctggacacaaaataaaacgaacttagctaaaataggttaatgtaaccacatcaccaagggtgagacagcctcttcatccaacatatgaaatttattgaatatatctactattggttattttgttggtattgggctgtgtgtatttactttcacactttgtgcttgatgctttgcagattcatgtttttggagttttctcgagatcggaaaatgatgagtgtcctttgcagccggaaccagatgcatgtttttgttctcaaagggtgcccccagaagtataatatctagatgtacaagcattctgtgcaatgatgatgggtccattgtgtcacttaccgctgatattcgagcagagctggactc

SEQ ID NO: 5697 - DNA, 714 bp, Glycine max
atggtgccgagaatggttatggtgctaaagcagcagaaattctcgatcaagttagaggaaggtctgtgatttcatatgggtagtggagtaattctgctttacaatatttgcactttttaatgtgatgtgggtagtgactttggcttgcaagtttagcctttatatggaaaggcaattaattattcacactggctgcgctagtttaattttttagtgagtctttcgagggaaaatctgttgtttaatgggaaattcagaagttagcttaacttagatcttcatgttatgcattgtgtataattagagctgtcactcaatataaattgcttaaaatacagactcgtgattttacgcacaatttctttgatatacacattccatgatcgtcttttctttctgatattttttattattgacatggaacttttttctgatacaggggttttcgtcatgagaagactaagaagaaacgtggaagctaccggggaggacagattgatttacaatcccactcagtaaagtttaattattctgatgaggactgattgacgatattgttttattttgtgggggactgcgcagtattgtactattgttgtccttattttcgttaccatcagacacaaagcgaatcatgctgcggatatgaaatttgtgatggggggagatgttacattccaaagacattgctaggtttctggtaaacaagttgac

SEQ ID NO: 5698 - DNA, 881 bp, Glycine max
atggtggaatatttcaatcagaaggctaatatatcacaaagctttcctcttgggacatttaattctgcgtttagcttcactggttcaaaacacattgatgctactgagacaaaatctctttcttcagatgggttttatattcccctcgcaaaggttcagcttacaaatgcccacttaacattgcaagaaaatgtcaaaagggatattccagtgaattgggatccaccatccttggcaaggtatgcatgtacaagttatctacagaatgcagtgacaaaatatttatcttcagattgtccttgaccttgaatcttattttgatagctttattgaaaactttgggacacatgtcattacatccataactattggtggtaaggatgttatttttgttaaacaccaccgtagttcacctttgtcaacattggagataaagaactatattcaagacattggaaaccagaggttctctgacatcaataaccatacaagttcacttcaaacaaaattcaaggataaggctagtttcactttaattccgattccttatagtgatttgattcaggttcttgataacaaggaatgtattacttattttgtaattatataattttgcaggttgttgatcccttttcattcaataatcaagagatacaccctcaatctgcatctggaacttatctaagtggggaaagtatgcagtatatattctgtgaaatattttttaagctcaatattgccatgatccttagttttagttggtttaaaaattgtttcgatgaattgctgttcaaatttggaaagcagtactgctagatatactattagcactaagttttgggcatcaattgggatttaagcttaagcatttgaacaatagg

SEQ ID NO: 5699 - DNA, 853 bp, Glycine max
  misc_feature (823)..(823): n is a, c, g, or t
taacaaccatcccacaatatgttaaacttgcttgttcacgagtgcatcactgttttactacttcaccatagcctgacccctttgttaatgataaaaaatgacttaattatacggttaatttcttaattatattttaaaatttaattttatctctcaattattaaaaaatttaatttgattccttaattatttaaaataaaataattatacgcttttcatcatatatgttaattgtttgatggaaattagtatttttgtattgattgttaacgcaaaaatgataaaacgttattttttaaatcagttgtttaacaaccaatataaattggggtaaagtttgagaagattgatgatgtcttattacatttaaaaaatacaatattttacataatctatgttgataaccattgcaaagaatattgatttgcatcaaataattaaccgatttgacagaaataatataattgtttcattttaaatcacactgagaaaccaaattacaccttaataataaaatattagctttcttggaaatccaaacacagaaaacagaagtccaacacgggagatgtttgacggttggagaagaagcgtggaatcttccatgctgcctgtagctgttctcccttacccttcccttcccttccctcccaataaaaaaaactccatctccttttcctcattatatctttctcgcaacccaaacactgtcttcaatcccccttgtctcaatgaagtttcttccttttctcatttccttcctttttgcctccctaatcgcaacctcaggaacgccgcatcccaatgaagaacgcctaacatncacagtgcacttcatcatcgacccgcttcc

SEQ ID NO: 5700 - DNA, 869 bp, Glycine max
attgcagaacaagagcgcaatgtgtacaccaaacatgaatttaatatcgttactatttatcttgtaaggctctaaaggatttttgtatggtgatgatgattcaactagaactttgagaccgagggggttataaattactacaacgtgcttgtttactaatcactagaattaaacacctaaccaactagtttacgagctaaagtgattttacaaatcatatatagtagtatagatgaagtcaaatcaagcttgcaagttgcaaccaacaaattgtggtttggagggttcaagatggaaaggaaacacgagtttgacagttgttacaatttatccagctctgaatttttgagcagtgatgattcaagtagcacttttggaataagaataataggagaggggtggggaacattattgattactacaacgtgcttgttcactactagaacttcaactcttaaccaacaagttttatcaatgagatagtgaccaacaggctttgtatgcttaaaacatgatagctataagatgcatttcatctgtcttctttaaggatttcagatgtttgctatttgttgggtactccatcttcattatcccaaaagaaccatccctatttattgacttcatatttggcgttttgcctaaagaaaaaatagcaagtagaaggattaggtaggtagagaaaagccactagcaagagagagaggaaaattgggttcataacgttaaatctgatattgtaaaattgggcacacatgttttggataattggttatagataatattactttacacagagacaatcatggcttaagattttcaataaagtctgtttgtatataggatagtgctcaaaagccacagctttt

SEQ ID NO: 5701 - DNA, 840 bp, Glycine max
atgtttcgccagcttgcatgcctgcagggagcccattcaccaggttggcccaagtcttcgttgcggcgtggcgcaagtggcgcgtgcaggccacgcacggccactacaactttttccatgacgaggatgaggagcatcatgagccccatcatcatctccatgttcaacccaaaatccacactctcctccatactcatcaatataggtgggtgccacactctttcgaactaactactagaactctccatattttttcttcccatcatgaagttattaaaaaaaataaagaagctatactttaatttactatgtcatatccattttaaaacaatggatgaatcatttttttgggtgaatgaaatattttctccatgtggtttatgattaagttgaagtggagggaatgatgttggagttgtggtgggaagagcaaagtttgttgaatagtgttgttatatttagaatatgccttttagtttgatgataaagacattgaccaaataagttaaacttttttttgttagagaaggagaataaatattatgatgaatatgtatataatcaaagtcaactatcttcttaaaaagaattaggaggggttttccaaaaattctgctcttctgaattgaaaaggtgtgctttagaagataacgcacatgtaactatattgataaaaaaaaattaacggtggaaattatgataagcattatatatatatatataataaatttaagatagttgcaatgatggtcagtaatatactttattatctgaatacactattcccattttagaaagtggaatcctttttacacttacatgatacaatgtattaatgca

SEQ ID NO: 5702 - DNA, 822 bp, Glycine max
tgttcgccagcttgctgcctgcagaccaatgttgagaagatccaacggttaacgaaggctggaaagcgtttttaccgagtcagctcatgtagcttcctcaagaagcttcattaagaggcttcctcgtggcttctttgagaagctttctcaagaggcttctttgagaagctagatccttatctacccacacccctctattaactaaattaacctccttgaaaataattacggataaaaataacacaacaaataatcaaacatcaaacataattactaataatatatagatatatatatcggggtgttacagtatggacttgtcatagtggatgactactctaaatggacatgggttatgttcttaaaccacaaatatgggtcttttgatatcttctttaagttctgtaaatgtgttcaaaatgaaaaaggagtatgcattacttcaatcagaagtgatcatgggagagaatttgaaaatgataggttacaactgttatgtgaaaaaaaatggaatccttcacaatatttcaacaccaagaacacatcaacaaaatggggtagttgaaagaaagaacaaatctctacaagagatggctagaaccatgctcaatgataattcaaccctaagcacttcagggctgaagcgatgaatgcggtgttatcttcaaaatataatttacataagtcctatccttaaaaatactccttatgaattatggaaggggaagaaaatccaacatatcatattttcatccatttggatgcaaatgctttattctcaacaaaaagggtaccttcggaaaatttaatttgaaaagtgat

SEQ ID NO: 5703 - DNA, 852 bp, Glycine max
atgattatgaatagctatttatattacaaaatttgaggaacttgaacaaaatgtacaagagctggaagcatgcaaagcccacacaatccagagtagctctgctgtattacacaaactaatttactcaacaatacaacacacagaaaataaacaaaagagacaggtattgttatctaggccctgaaaggcgaaccgcggagagataagcatcactgttacagtctgagggaccagaagaggtggccccttcactggaggatttgaacacagtggcataaaggcgagaacccaacgaagaactggttggtgggttaggaacaatacaaataccctccaacatttggacaactctggtcatagatggcctcattgacatgtcttcctgtatgcaccacaatgcaacttttatagcacattgaaacctatcatcattctcatcaattttcaactccgagtcaaaaatatctctcagcttcccttcttccatcatcttataagcataagttgggaaatgggacttctctgaagacttactgggatcgtagtttttccttcccccaatgatctctagtagcaccataccatagctatagacatcacttttctctgatatggcatagtttgttatccactccggtgcaagatatcccctggtgcccctcagtgttgtgaaaacatggctttgttctcggttcatgagcttagccagcccaaaatccgaaaccttggccatgaaagtggtcatccagaagcacgttttccggcttgatgtcacaatgaacaatctttgagtcacaatcttcatgcagataagcaagtccttttgctgttcccagagctatattgacctag

SEQ ID NO: 5704 - DNA, 883 bp, Glycine max
  misc_feature (713)..(713): n is a, c, g, or t
acgataacatcataataagaaagcaaatcaaagaaaaatatgatcttagttaaaagaaagaaagaaggaaggaaaacccacagggcaaagctcctttgtaatttcattcaaggtcttcttgggttttttgatgtagctcctgttgtttaaatttgaggactcaaatgcagctcctttataatattgttccatcatgtgagtatcatatagatgtggtaaccttcgaaatgggtttattgccagtatacgtctgcaacaatgtagtagtagtagcagcagcagcatggttacattgagttctactttcactaaaataaaaaaaaataaaaaacaattttagcattaaaagaaataataagattattagtatcttacttaggtacatagatttcattgtgttcatatctagctgccaagttgtgcagaactcttgtttcatgcaagtatgacagttttgtcatgccatatacacctccagggggagcttcatcatctttgggaaaacctgagatatttgcgataacctgcaactagatttcatgctgttaaaaataaaatcataagcaaaaaccttggacactcttctttagttactggtcaaacataaaggacacagtcaattagacaataagaagggaataagcataggatttgttttaccaaagatataaattaaacatataaggcacaattttacagattacattacattntagataattatatattcttgaaggttatttaacccatcttgattcgcagagcatgtaaaaaaaaaaaagtttacaaataaaaatagtatcaatctcactagcaaaatgtacattgttagatggggacaagtttttttttggtggttagattgggaggaacaagcacctga

SEQ ID NO: 5705 - DNA, 834 bp, Glycine max
aaaaccaaaaaggagatcctgtagcacagagcatgcctatggagaagtgctcatcaattcaagattttggctcaggtactggtgcagatatctctcagactcaggtatctgcacaatattcgaaaagatcacgttcacagttgaaatcttatattgcccacatagcagaggagatgtatgtctacaggtctttaccccttggacaagatcgcagacgtaaccgatattggcagtttgttgcttctgcttctagcaatgatcctggttcaggcaggatctttgttgaatatcatgatggcaagtggaggcttattgattctgaagaggtaaattgtttattcagttttttccttaagctgatcaactaaattgtaccttggttttgatagtttcttatatttcagtgcacactttaatgacatgcatctaaggacttagggcactgcaagtctccttttagaatcctaagagatattacctctaaatttaattttttccacggcaatatctgatcattagcaaatggaattattaaggatagcctctgaaatttaaacatttgccttgtgcttttattcatggtaattattttgtatgtctttttatcaaagtttcatttttatttatcccaccattaaaatgcaggcctttgatgctcttttgacatcattggattcacgtgggattagggaatctcatttgcgcttaatgttgctaaagattgagaattcctttaaagaaaatgttcgaaagaggaatgcatgttgtgccaaaaatggaagcagggggcgaaattttctattaaaattgagcttatgaacatgttcattcctg

SEQ ID NO: 5706 - DNA, 845 bp, Glycine max
agcttgcattgcctgcagaaaacgatattgtattccgattataaaattctcaaagcttatagtaaagaactgataaaagttaaatttacatattatgggaattccagaaaagtaatagatcttagacaagcctgatacagaaatatcacaaacgtacaaatgttgacaaataaactcaaacaagtaaataggcgtagatgtgggaattgaaaagcactgcaccaatgcaatgtgctcccgtaagcccttttttcagtctttgactaggtattccacgggcataagagtgaaattaatcccttgtcccaaggatagtggttagataaagcccttctcagcgtggtgattacaagattcagacccctaacattgtagctgaagtttgcctagggtcaaagctcataactattgaaaccaaccacactattggatttcaaagccccttatttaatgaatagaatgaacaatttcacataatgcaatatcaattttgaatgttacatacattcttttgaatgaagcttggagaaacaataacatgcagaaatatgatgcttcgggagtaaaatagatgtattaaattaaaactatagaaaatcactgtgcaagaccttttcagcatgaagttgtggagaatcaccatagctaaagtatttctttttcagcaagagttcctccaacgtagaacacatttgaattttttccatagcttcatcaagagcctgaaattaaaccaaaattctcaattgccactaacaaataaatttacatataaatatacatcttgaatctaataaatggtgcctaaaatatcctcattagccatatatgaaactcatgtatag

SEQ ID NO: 5707 - DNA, 828 bp, Glycine max
aaaatgggctagacttcttgcatagctatgcttcatgtgtacacctacctggtatataaaaaaaagaagcaaagcagaattttgtaaccaactaaaaagcctttgaatctgactgagcataagatatttatgacaatgtagacacaatagaagatttttaaagtatcatgattcataaaagatatttgcctatcttgctttcaggtttgcattttctggttgaagaaaacaggaaaaagagtgaaagagaaaaaaatagaagttcatactgcaagaagttgcttgaattcatcttcaactgtggacaacaccagtcgttcatttcctaaagtcactggatttttgtaagtatcacgcctggtttcatcaaccacaaactgcttctttccatatcttagcacagcttttacaacagaagctgcaaacaaatacataattaaatgaataattgcaataaataaaagtgttcatttgtcccttgaatccagaaggaatggaacaacgagaaagtgtggatatagatactgacctggaaattcattctcccattcagaccagccaacataccctccactgttaaaagtgctgttgtaggccctcgcagatgaatctgtgggctgaaatttgctgggtacttttcttagattataaccgttggaaccactagcaatatccccgccagaagccagagttgcatcagaagaagattcaggaccaacacgctcaggaggaggcatacccagtcccagtgactttcttgagtgcttgcctggtggccttcctctctgcacaatttgggctgtgggtcactatcatcatcactatctt

SEQ ID NO: 5708 - DNA, 798 bp, Glycine max
ttggaccaaacttagtataattgaaggcaaactgtttctaataccatgttcatgaaaacaactctttggcaagttggaggccctatctaaagctcaaagattctactacctttggatcgaagacattggttggtgtgttggtataattagcatttgttaaactaataaggttgttgaattttgatgtttgtcttaattatttgactcgcttgaccgttagatattaatagccttattgagcaagtaaagtaattgacaattgataaagaacataagtttttgagaaattaggtaatatcttaataattgtattggtgacagaccaaattcatctatcattgaattcttgtttaccgaattacagtatattgaattctttagctttctagctagttgctttcttcctctttttagattctcttgtttaaatcacatccccttttttgtttatcatcgaaaatctaagaattaggttaaactggtacttcgacaataatccttgcaagatccatattttagaacccttttataattctaaattacttgttgatgtgtttatttgcccaacaggaaaacttaaaagtaaaactagatccgatcagatccttaatttgttctctagaagatgccaaagtaaaattttcaatcatgatgaacaagctcgatatgaccatcagtttgtataggttaaaagcaaaatacataaatttaaacataggtttaaatggttgagtaacgctcaacaacacaacaatcacaaatcaacttaatcttattttcaataaactatatcattca

SEQ ID NO: 5709 - DNA, 869 bp, Glycine max
gagatcttggcattttttggttccttctatctaatgcaaaccaaattgcttactagagctaattactgtcttaaattgtattagtatttaagtactatatatatatataattatatatagtgcattcttcctaatattttaacttttcaactcagtactgatttaaaaattaaaattctatactaggaaataatagccacgtacgttatctaactttcaaaccaaactattgtaaaccaaactagtgtatgaataaatttattaacctaaaaatccagcatcttcacataataaattaaactaccaaatcaccaatagtcttgaaacactagttaacaggatttttcttaacaaaagtgagtcatgtgagaagcttacacgaagctgtaaaaggaaggagagaaagagaagagacagaatacaataatacattgcttgtttaaatggcacgacctctttccgtagtacacacttcattcattgttagtacttagtacgttgaattcatgttatagatttcattttgggcttaatgtttggatcctagaaaaacccagatagagaccccaaaggtcaattaacgtatacctttcattgggttggcaatgcaataatacccaaggcccatgggtattgatgcatttgaaccctacattatatataatgactttgtaaccattaacttttaaggaagattttaaacaactaaaagtaaaggatttttgttaagaaaaaatattcattggtgtattttttttaaaagtgtaaaacatacatactctctttatcaataaattctatacttttttacacatacaaagcctattagagaaacataattctgataacacaagtcattagaaggctaa

SEQ ID NO: 5710 - DNA, 831 bp, Glycine max
agtgatgcctttgtcagtgctcttcactgttctatacatctgcatgaacaccccgcataaaataaaatgagaagaaaagtccacaaaggctaagattatcacattatatttctagataccccttttgtccctagcctttggttctaccttccccactactagaggcaacctagctataacgactaacaacaatactcctctctctctctctctctctctctctctctcttgttctgtctagtcagaaattaattgaaagaggaataaacaactgaacttcactcattaagctcaaagactatggagaaagagagagatatgggaatgaatagtgagtaccccacctgcaagtgactcttgacatgtgctagggttagatccttaacattcattaactctaaaacagacttcggagttgctcctgcaagtgtgagaagacaaactcaagattagacgtaatctaaatgttatatatgctttatctcaaaagaatctagcttttgcatacaataataaagaaaccatcaaactattcatacatagcgtaataattaattagaccatgttcaaccatcacaagatttttcaaaataattacagaaaagaagaaggaaaaaacgatttttcttttaacaccactaagatcaataatggatggattagtaaccaaatttagtgactattttcatcaagttttagcgacggatttaactgaatcaaacatgaactatattaatggaatttactttcgtggccgccaagaagttgaaccgcgtgaacaaatgggcatggaggttgggtggtccatcttatcctaagagccctgacact

SEQ ID NO: 5711 - DNA, 767 bp, Glycine max
tagagtcgacctccagtttcattggtgtttttgccttttttggtggtgttctctaattggaattggagttttactttggtaattcgtgtaatgaaggtttgtattaaaggtcaacacagattactgaggcaaaggttcgattttgattagaaaacaacaccaaaaacacctatgggacttcatttaagttttgtccttcttggaatttggagtgtggattgtggattggtttgtgtggtctgttgtggagtgaggtcaatggcactagctttggttcttgttgtccaatgtatgttgattagttactaggacagtttttaactctgcgtgatgtgttgctgtgtgtagttgtgtagcacttgctgctgttgatcttttcttaggcatgtccaggggctggatctgtgaattcttgaaactttgtctttgtgtagataatgggggtagggtgtggtggctggatttttctgtgaatttagctgtggatttgtgtgttactatagttgtgattgctattttgacttgtgaggctggcaagaagttttctgatgtcaacaatattcacttgatgctcttgcttcattatgaaaatatttctgccagtattttggcattgtgtaaggggccattggatttgagaaaatgttttttggtttcatttttctgttttcactttgtatcatgatttcaaagtttatgcagaaaaaagtgagaacaaaaaccattaaaaaaaatttattcagtgtttcctagacaaagatttgaaa

SEQ ID NO: 5712 - DNA, 1148 bp, Glycine max
ttcattctctgttcatgagattccaaagatccctgcaattcctctaggctaagctcttcaagatttttggattcctcgatggctaccacaatatggtcaaacttgggtggcatggttctaagcaccttctctacaactaattgcacagttatcttttctccatagcccttcattgaattcaccactgtctgcacttttgtgatgtactcagcaactgattcattcttttccatttgtagtagttcatattgtctcctcagagtttgcagcttgatcttcttggtttttgtggctccatcatgagatttctgcataatgtcccatgcttctttggaggtttgagccattgctatcttttcaaagttagcagcatctacactttggtgcaaaatgaaaagtgccttgcaatctttcttttctttttctctatcagcagccttttgttcatctgttgctctctctcccacaggtatataaccttcttctacgaactcccaaaccccttggaatcgcatcaccaccctgatctgaatcttccaattttcatagttctttcctgtgagaacgggtagatttgcaggaattgagccagatactgcagccatcaaagaactccttcaagaacacctccaagaacctttctttagcgattcttgccccttctatcaaaaccaatgctctagataccaattgttggaacacacactgttcctcactcaattgcaagagatgcaattcactccctcacacattcactcgtgtatcactcactgttttcaagcaaagaattgcacacctacacactaggaatagcactagagattcaaaatgatagaatgaataatcctctttattaagatgtatgtatgtccttttatacaagcaaaacagagtaacaacccttcacacttaggctagcacttataacagaattttaaaattctgttactctctcttatattcaaagtacaaacaaatctacaccacacaaaacagaattaaactctcacataggtgttcacttttactcatagtcaccaaatttaaaaccgtttgaattgagacttttcttggtattttgatataaaaatatgtgatggtatggttctgatataagttaggattagtcagcatgtagtaggtgaaat

SEQ ID NO: 5713 - DNA, 877 bp, Glycine max
  misc_feature (703)..(703): n is a, c, g, or t
agctttgcatgcctgcagcaatccattgttggatgcttgtagcaaacgctggactggaaatacccttgtcatgtaactttcagaaaaccatgcacatgcatgcgaaatcacaaaggaaaaacacaaagagagagagggagagaagaagcagatcctagatcctatatacaaaggatagtggatatacgttaaaggatagtggatatacgttaaagtaggagaactagtgttccttttcattctagtgcttaacttgaccttgaccatttattcttcatttttgtgaggtaaacattatctatacttacataattttagtagtatttaatatgaaatagttctcgtagaaatcatatatatcaacaaggtcatgcatgtgttttaattttattgaacaaatattgataaaaaatgcaaaatagtattttatatttttattctgaaaataatgttttatttggcggaaatcattgtgtctctacattacaaattcgtaagatcacatatttttatcactcttatatatatagatagattaattacactaactctcatataatctcctctaaaaaaaaaactctcatataatcaattataatgttatatagaatatggttttaatttatccatcttcaaattataattgcatcagttttattaaaattaaaaaactataaatatattatcaaagagtaattagttntatatatcttaaaagtatgtattagattaattttaatgtatatcaactgttaataattttatttcccaatacggtttttaatatgatcgagtgagacttggaataatttacactggatagtgcaagaataaagtgcacacacatatttaaatatttttatattaatttcacaat

SEQ ID NO: 5714 - DNA, 859 bp, Glycine max
agtgtgaagaacgaaatacttaaaacgcaccgtttcaacgaaaaagccagcttattaaaattacgaacaaatagtccatttcgtcctaaaagtatgaaaaaccaatcaatttatgataaaaatatttaaatttaattattgaatgtgagaagtaccgcacactagtcaatgaaaaaaaattgtcagtattttttcacatttaagtattaaatttataatttttttatcaatttatcatccgatatccattactaaaaacatacaaaacatatttaataagtttttataatatttgataatttttaattataaaaagtttcttaaaaaaaaacttataatagagagtggtaataagtgtgatagtgacattttttatttcttcaaaaaatgaggtaaaatgtgttttaattttatcatttttttaaattgatattaatttctatgttttaaaatctttttttttaataactctctttataaaacttaaaaaattgagatactttttttctgttgcaagaaacttgagaggcttaaaatttagttattttactatgttatcaaattctttagtatgataggataagaatgcaattttttatcgaataattgcataaatctaatttatactaatgtatatatatatatataaattaatttttaaaaatagtaatacaataaatattttttattaaaacacataatttgtatttttgagtttataagcaaatattcattaattattttatgagctactaattcttaaattaatatcgtatttttttattaaaataaataaagacagggacagaaaagtaaatgacagcacaagactgggaatataaatccgaggcaacaagac

SEQ ID NO: 5715 - DNA, 890 bp, Glycine max
  misc_feature (813)..(813): n is a, c, g, or t
aaaacaaaagtctccctttatattttcaataagaaatgtttcaaccttagattcttttatattttctccttctctttcccatttcgccctttattattttctcaccatcgtggttgtgcaccaaggcatctccctcacagcgtcgtcgaccaaggtcccgctcattagcgcaaccaccaaacatcgtcgccagattcatatctggaggcgtttcgacatttcgatttttctttgtgttgcgtttttagatcgggatgtgttgttattattgttctggacttgtccggagaaggaaaacaaaaatgaaaaaatgaatgagagaaagaaaggggaagctaaaatcaagggttctatttttgttccaaatctgattctgtaataagcttttttcaatttattatttataattgctaatcgtctgtccgttatgctttttttagagaagaatttgggaggaggaggaaagattaaaattatttaattgtttggtaaaaaaaaaaaactagagttgagaaaattttaaaatctgtagaacctattatactgttatttactcttttttttatctcttttcatctcttctttatttatcttcaatcaaatatattttatttctattttattttttaattattttcacacattttttttatttctatctattatatttttttaaaaaatatttttgacctttaagaaaatgcatttttatttttttgtagcaaatactttctctaattttaaatataagaaaaaaaatagtttttcttagtctcaaattaaaaaaatcaattaatttatttattttaagtntatatatctaaatatcggtaattatttgggattagttcactgactcatttttatgaagcctgttttgccctatgaaa

SEQ ID NO: 5716 - DNA, 897 bp, Glycine max
gaggagatgcttgattgggtttgtgagatggaaatgtcattaaatattgaggaagtgccttcgttggcttgccaccttcgtagagcttgaggaaggctcatatgaaggtcaccgccagagccgtcttcctcttcttcatcatggctagtaggtttccattgctccacaagaggaaccaagacgttcactgcatgacccatatccggcctttggtatggttcgcgagcagtgcaatggcctgccagctcggccactgtatatatgcttcccatggtttcctcatctggattgagaatttgatcaattgcctttggaatgttttccttgttaattagtaccctacggaaccatgtcaccaagtgagacctttcatctggcacagtatcatccaatgcctttctaccggtgataagttccatcagaactactccaaatgcataaacatccactttggttgtcactcttccagtagctggtaagaaacagagtaacattaaatataatcaaacaaatagactagcactaatcaaatgccatctaatcacattcaatgcaacattttaggaagttttatgcttgcaaaagtcttgatgctaaatggataaaaacaacaccgatcaaaataacagttgtaacaaaagatgtttcaatgcaccgatccaacaaggaaatgggatagaatgataaattccacaacagtggattagttgcgacagagaactaccacctaagcccatgacaatatacagcaatcaaagatttaatgcatcccagagtattcatcacatcgtaagggataattgagagtcagactctggtaaactgtgctaaaatggctcgacatatctttttgaggcatcgaccaccaagaactatgcagcataccccccacccact

SEQ ID NO: 5717 - DNA, 878 bp, Glycine max
ctgatacaataattaatacagttaatggacaaactgttgtttgccaatgctgataaattctgaggatgggcataaatttcatggtttgttaaaaggaaaaaggatgagtgacactgcttttatggatgggcctaactttcttggtggggagttaggaatcaaaatgactttttttttttgttatatgctatattatttgatgaaaaattcttattaaaagttcatttggactctctttgatttttccccaaagcgatgacaccgattaacatataaatataggtcatccatctgcccctaaaaggggttggacgttcccaggaaaatataaatatgataatgtaaaaatgttatggttttgtatggatttgaaggcaactattataatagtatatgtaagtgcaattttgtcaaagactttaatgaagtttgatgtatttgggttacgatataacccaatttttaaaaagtaatttatgttgaacgtgtatcagttgcctaaagtcaataattattgttttgttctgttataataaatctatatttaaatagatgatcattcaataaagcattcatcttcctttattgttaagatatgctttgatactagtttaaaatttgagttagaacttattctcacaaatttacttgtaaggtactaagatgagcgttggacatttacttatatacattttggcaatacataattacttgatgtgggattccgaccaacaatcatttatatagactttggcaatatatgacaatttggaataacttgtcatgtttggagaatcgattgtccacaacacttttgaaactagataaataagtatcgctttcaagacataaatgtgttaaaaaaatatttatatata

SEQ ID NO: 5718 - DNA, 822 bp, Glycine max
agcaaagaacaatttggccttctttgggaatgcatcatttgtttccacatgattatcctgtcaccataacttttgaaggtgagcaatcaaccttatactcttgaaccttattatccactcaaaagaagccacaacatacagaacatactaacatagttatgagccccaagcatgttaagcaactacaaccacaaatgaattacttttaatctcatatctacctgcttatctagactaccgtttgaaaaaaccgtacagagtatagcatgcatataatataagaattgatgtcaactcaagattggtgacaactcaaatatagatccatacagaagaataaaatatatgtgattataaccattgtccattggaagcacacaaaaaaaatttaaaaaaaaatgctcatatgtaaaaaaatacagaagttattgaaacaggtttttcttaaactgcttggtctaactttaccagcacaactgatgagtggtgacaaattgcttgcaacagaattctcagtggtgaaattttcccctattctatattttatgattttatcaacttgcttgattcaatttttgcatgagccttattgaatcaaatctataaaaataaactctggaggttacatttcaattttcagaatgagacgattcactaggattttcatagaaaagcaaatgccaaatgatatacctagaatgtcctgttaaatttgcagttctataagataataagtttcaaagcacatgaagattgaagagataaaaaaatccttaaattaactgacatacgagatttaagaagtcattagtcagcctattc

SEQ ID NO: 5719 - DNA, 862 bp, Glycine max
tggctaaggctagactgtgatattcagcctctgtactggaccttgcaacaacagactgtttctttgaccaccaagaaactaaatttgagccaaaaaagatggctgcaccagaagttgaccttctgtcgtcaggatcagatgcccagtcagcatcacaataagaatgaactgtaaagggaggtccagtagagggagggagaaacttcaaaccaaagttgacggtaccagctagatacctgagaattcgttttactgctgcccaatgctgttctgatggatctgacatgtactatttgttaacagagaaactgatttcaggtcaagtgatggtggcatactgcaaggctcccacaatagacttgtatagagtgggatcaaggaaaggcacataccctaacttagttaatgttgggaaaaatccaagttccacatcggctaaagataaagccaagagtatataaatgagggacaaccctcacccctaaagctagcttttggggttgagttaggcctaaacccacattctaagaatctaagatggtatcggagcatatccaatattactcaaaaggatcacccaccattgttatccacgcaccaagcccaagaagtgctgggcatgagggaatgtattggaaaaaatccaagtcccacatcggctaaagataaagccaagtaagagtatataagtgaggggcaacccttacccctagagctagcttttggggttgagttaggcctaaacccacattctaggaatctaagatggtatcaaaacatatccaatattattcaaaagggtcacccacccattgttatccatgcaccaagccccaagaaagtgttggcatgaaggggatgt

SEQ ID NO: 5720 - DNA, 870 bp, Glycine max
ttccagttagcatgagtaggattgaaagtggcaacatctccggtacaccagtggttggagagggacagggagtatcattggtgacatagccatacagatcatgagccttgagaaggtgagtaatttgagtatgccaagtataatggttattggaatttagtttaatacgcagaggcatttatgatttctaccagggacgacatggtaagagaagtcattgatgggttgagacttgagaaaagttattaagcgtagggctaatctgataacaaaccctaagttatctattaaattatatgtaacttaattaaatttgaatttaaatgataacaaattaaaagataaacttaaatgatcatgtcaataggccaatgataacatataaaaatgaaaatgagtgactaaaaattaattatttggtgcataaacatgatgctaattagaaaattgttcttgtgttaaaaatattcttatactaccttttttaatacaaaatgatctgtcattagattcttctttaaacattgtaattttaaaattctcatcgacattattattgtctgacctagagtcatgcattttctttccataatgattgaaattagtcttcggtgtatcaaaaaaagctgagtgttaatatatctcgagaggaaaatacaaagagaagaagcctcctagcaatggttaaaaatgtttattgttgacttctaaattcttcaaataagtattgtctatctatacaatttttctcaataataaatcaagttttaataacattgcaattctcaatgaccagtcaagttttaacattgcaattctcaatgaccagtcaagttttaacattgcaattattagcttttcacatttttt

SEQ ID NO: 5721 - DNA, 905 bp, Glycine max
attctttcctgtctgtatatttgcattggtgcagttccctctatatgttgccatgaaaggatgtttgaggagtttgcttaggaaccttaagaagatcattcctcgtttcctcctcaacttggtcaaaaagagcaggagaaagaaattgtgggacatttgaattggaaactctattttgtgcccccctccccttcctattttttcacattttttcttcaatcgtaatttcttttggttgggtccatttgtctatgacactttactttttcaaggtcgtcaacatacagtgattgtatatttgtatgggttatttgtggtaaaataaccattggacatggatgtccatgaataagataccacgtctttatcgtgacttttggtacacaagaaacaaccatcgatggatgtggctttagtaggaattttaaatttaaacataacatttttaataggtcatctggtgctgttaaatgaacaccagtaaagtgtactattattttttaaaagtagctctaccttgagacaattattaatataatcaaatgcattttttttacaatgtcggcaaatgcataacgaatagcattattgaaaatttaaaatgcaaaatatagtttgataaaaaaatttattgcatttaatatagtagaggaacttttgaggctcaaaaaatcatcaaaggcagttctagccaaataaaattcaccttaaagcaggtcaccaatccctccatcttggtcaacgtgggagtgtacatatttacaagacaaataatgatacaatgaacatttacaatgagtgtgacttaacagctgtacaaattatgtcctttaacgccatgtccaagggagaaaggagatgtggagtcattcaattatcatcaacttcgatacaatcagcagtgc

SEQ ID NO: 5722 - DNA, 813 bp, Glycine max
aggtatttccagaatccatgtaatttaacccaattcgtcttaggcatgacattgatgacaagaagtgataatagctagtaatacatgaaagtgtttaccacgttcgttaaggcgtctaatatttacaaaattaccactaacgacggttttggtaaaaactgaatctttaaacaacattttgtatcataattaaaaagcaagtccgcgaatcagagcagggctaatatttaatttgtaaccaaacaaaaccttaagaaatgtatttttaaatgaagaaaaacactagtggctaacttgagaaattggggacagaaaaagagaacagatgaagataaagaaatgattttttgacatgtcattgtttgcaagaatttcttatgttgagatacattaatatacggcgaaactacattgattagatttcttgcttttgtcaggaaaacacaaaaaatatccttcccatttttcccatggatttgactgacaccccagcaaaaaaagctttgggcttcaaggaatttcatcttccatgttgcatagtgtattccacattcctcgtcacttccactgcgctttgctcataatgggtcccagtatcatcagatatcgagcacaaatgctgacttctcaattttctttcaaatcgtgaacacaatcgctgttgagcttcgaggatgcatttactgagttctttcagcgaattacagatatcatgactatcatgtggtgctacatgcagatttttatcttgcttatgttgattgccacgccgtgctattatgttccaagactcaacgacgttagtttggatgc

SEQ ID NO: 5723 - DNA, 842 bp, Glycine max
aggtttaaaggccaaggattttgatgcaacccttttaacaataaacaactttgaagttcttactctgtgtaaatggacttttgaggtatgccatgctcgtttaattgcaattttttgatatttttttctatacattgagaaatgacatgggttgaacctctacctagtacttctatgcaaaattctgtcacttgacatattcttatgacattaatatggtgtgatatggtcaggggtttcatagtgccaatcccttaaatgaatattagaatttcgagatattagtttctgacttttgattaaatgataatcgggtacatcctgaaaaagcatgttcaagatgtctcattttcttttatgatgtgaagtatgaacaatttaactccaaaaaggttctcttttgtaggaattttcttttttcactaactgatgtgcagaatgatcctgaaagttatttggctggagggtccaattcatgcgtagtgaaagggactaaatgcacaggaatggaacatcttaaagtgataaaatttatggggttttcaagtcgaagagatgaaatctccctggctaaatgtttgattcatatgatcaagggaaagcctccaaagataaagacttcagatgggaattgcttggatgcaatgtttgtcgagtgatttttacatcaatcacagctaatcaagatttcctgcgagtacctaacaaaggaaaattatgaacaagtcatgtactaagcatgtatgcaagatattataaataggaatacattttgtttcttgtctcctactggcctctttaagtagtcttggagcaggaatatttatggattaaattgattc

SEQ ID NO: 5724 - DNA, 912 bp, Glycine max
gccagcttgcatgtccttgcagcgccatggagatgagaatcgaattagcaacgaagacgatggtggaaggtggtgtgtgttgaagagtgagtatttattgagtggggtctagatttttctagaattcttccgtttttactcttgcattcccaaaccttccacacctgatgccacctattaatccacgtgtcataatcctctctctaatgctatccacgttctttcatccttcattattaactctcttcataattcttttcaacatcttattaacccacgcatttacggtatctttacattaatgataagtaagttttagacgaaatctttatatatttggccggaaaatttttaaataatttatttatagataatttttatatatataaaaattagaaatatctaaaatcgaatcaaattatttgtaaatcgccaaatcaattaaaacaatcacttaaacccgaaatcacaaaattaaaaaatataaaaaaattacattttttttacagtttgatttaatttgtggatcttattatcaaaatggaagcaaaccatatattacagttatattaattttaagtctcggagggaatccttatgtatttgaaaaaaaaaggttttagataatttatttttagataatctatatataaaagtaactgtttagtgcagttaaaaaaaattgtttaggataattatgcaacttaacttttctcacttattttaaggataacatctttatcttcatttttatattcttatattaataaaagtaaattagacttggggaaaagttctcacagatttgagtaaaaactttgaaaatatttttttataattataaataattatcttcatatatattatattaggaagtctataattttaagttactcaaattgtcataagaaa

SEQ ID NO: 5725 - DNA, 825 bp, Glycine max
taggtgtgcgaggaagggatgtcgctggggttggaagcgagccggcaaaggtgctgtcatgcgccagacaacggtgacgtgtgggtgctgtttggctcgtcaaggaaagagcacgtgggagcgcatgaaatgccggatgggaaagcggttgccggaaacatgtagattggaaggtgggggatggttttcgttattccctcaatctagttttgatagcatgtaaaatgagagaaaatagaggatatgtaattaatactaaagtcagatatcagtcggttcctagatgaattccatgcaaatgggatcttcccaaggggcagtaatgcatcctttattgccctaatcccaaaggtgaaagatccacaaaaccttaatgaatatagacttatttcactaataggctgtgtctataagattgtggtcaaacttctagcaaacagattgaagaaggtgatgccaaagataatagatgcaagacagtctgcattcataagtggaagacacttgttacacagtgtattgatagccaacgaagtggtggaggaagcaaggaggtgtcataagccatgcttggtgttcaaagtagactatgaaagagcttacgactccgtctcgtgggatttcctagcatatatgatgaggagattaggattctgccccagtggatttgctggattgagggctgtcttagctcacctcggtttctggttttggtaaatggcagccccacaaatgaattcatttacaaagaggtcttagacaagggtgaccccctagcgcccctactttttaataatgctgcgggaggcctaaccggtttaatga

SEQ ID NO: 5726 - DNA, 858 bp, Glycine max
  misc_feature (829)..(829): n is a, c, g, or t
  misc_feature (849)..(849): n is a, c, g, or t
agaaatatggtgatgaagagattggtgcaaagaaaggatatgcttacttctcattctctgatttgtatgggtcatcaattccacgtttatacaactggatgacaagtccactctcaacaagtatagggctcccttcagtagaacaagtatatacttctcatcatcaaggactgtcatgaatcataataagataaagttttttacacttaaggtagaacaactgcaatacatgtccaatggttgtaacctaaacaagtatgaggaagtagacatacccttcaacacagtagacatagtttaattgatttagcacggtatcgcttgaaattatgatttgtgtgcttattttccccaaggaacaagtcaagttggcatatcaatactcaggcgaggcatagttctcgggagttgccattcttatatccgtacttgctattcccactcactaactttgagcatgattccttttgtttttaattttattatattgttttttttaatataaacatgaaaaatatggagaattttttcaacaaaaatattataatgattcaatttaagctcatagccaataaatatatataaggagtacgtaccaataagacattgcccataacagtaacgcattattctctattattagttaaagtttatcaaataaaaaacaagacttataaaaatttgtgatttctgataaatttaaattaataatagaagatgtgtgaatgttcctgaaactaaatttcacatacaatttataagactgatccaaaacattcaactgagatgaaatgcaatttcacatagaatttactagacttaccccaanaacacggtcatgatcatagnaaggatgtt

SEQ ID NO: 5727 - DNA, 790 bp, Glycine max
  misc_feature (735)..(735): n is a, c, g, or t
atattgactggacataaaaatgaagtttggtttgttcaattttctaataatggggagtacctggtctcttcatccaatgattgcacagccatcatatggaaggtattatgctgttgtcattgtaagaagttttagctttagattattcatccaatattaatggcttctttcttaaatgtcaatttgtgtttaagctcccaatatatatgagaaaaaagtcttatagctattactactctatttgagatctctgaccaatatacatttcctatactatctggcaaattactatattttatgcctggttctatatcctaaataccagacacctattataagatcagagcaaacaatatctgtattccgtcactggtgtcctatctgatatccatggatatatggatggatactcaaaatatccacccaaattaccatcgagagaacctattgagtttagactgatgggtttatcttttgaagtagggttccatgtcagttttggttttactagttactagatagaaatgatcaatgcttgtaggtcactagatgagccgacttcaatagccaacccacagaaatgctatctcataagtgcctgattggttaccttccaaatgaagtttggaacactttctgaggctgaaattccaaataaaaaaaatatcaaggaaacaaagtttgaagcataatactaagtactaacagtctctaagtcaactgttataaatctgntgtctttctcttttagctgtctaagggatattatggtattcaatgtgttggagat

SEQ ID NO: 5728 - DNA, 844 bp, Glycine max
aagtaagcaccaaaggcccaagaggaaggaacgtatagcatggctggcatcatgcatcatgcatacatgcaccgtacgtaggaaaagcgcaaacccgtgtgatagcatcgtgtcttctagaagatgcgtaggtagtggaataaaggcatatttgctgttaggatatttcggattgcttttatcttttccgtttttgcttgtcgggacttgtcccctctataacagctatatatatatgtaaagaaatggtgctggaaggatatgagaaaatagcagaaaaacgttcctccgtagttctctctctcccactctcttcttctctcttaggaggctacttggtcctcgaactccaagctcgtaacatttgatcagtaaataaaaataatagatgcattgaatattttcttttgcctttacctaggaaagaataagctgtattagtgatgtaatgatacgatgatggaaacgtggctaagttgtatttgagcaatttagatgtgagtttgctcccagtttttgtaatgcttttctcgtggtggctttctgtttgtgtgtgtggactgtggagtgagggagcaaggaaaggagcacttggaggaaaatttggcactgccaaggtattttacctggtgtccgggcaccgtcaggtaagccacctatggccactctattcctactagcgactaaagagcaactagaaagactcacatccttatatttattttattaagttataattatcttatttataaaataatttaaaatattaacattatttttttttatcatgacaaaaaaattttattaatacgaaataaaaataatggtactcatatttaataca

SEQ ID NO: 5729 - DNA, 866 bp, Glycine max
atgcattttctttaccattatcctttttagttggtgcttgatatgattggtagattggcaatcctgtcgagaacgaccatatgactctcgtggaaccactctccaattgatccaccaagtacatagtcccatctagggtcacaatcagtgctgtggttgcagccttactgtcaatgaaaatattttatcaagtagaatgacacagttagaatgccactggccaataaaaatcatcaacacaattacaaaaccatgagtatgcaaggacagataatctttaaaattatagaacacaacctgattacaattcaagttataccacatatgaaattattacaaaattagcacaacaaaagttttgtctcaaaagaggaatcaatgtttcaaaagctagcataagtcatcacacatgtaataatatactactccctctaacccaaacgattgacgaaggggtgtaagacccgatgcgttcacatgaataggaactatttggcagaagaactcgtgttcgatttcgattcccaccgtgtgcaaaatttcattgggtcaatgtcagtcatgcacagtaagcggctctaatcccagtgggttgggggacaattgtggtatatgacccaagacccaaaaaaaaatatattactccctctggtccttaatataaggccaactaatttaccgattattattggcatctgtaattctgttacaagtgccttattttttataaggaccagaggagtataatttatcttattttgatgctattcccatctatatcagataaaaacaacgatttaaattgcagtcactggggtggtttcatttgcgatcctgatattggaaggaaattgcagacaaatgcg

SEQ ID NO: 5730 - DNA, 816 bp, Glycine max
  misc_feature (787)..(787): n is a, c, g, or t
ttgcatgcctgcagctctcagtgttctcatcactgaaaacgtgcgtgataggatccgccattgggtgtgaaggcattggtgggggtggaaagtagttcatagatggatgttggtcttggtgtgggtgtggccttccactacatcatgtgtggtgggtacacgttcatgtttgcttgcatttgttgttgttgttgttggttcatcatcatggccattagttgctgttgttgttgctgctgctgcatgttgtaagggttgggttgttgcatttgcatctgcatgccttggtagtaaccaccgttcatcgctgctgcggccgaggctgccggtaatccttgcacagccggcatattgatgttcatattcctcatatggtccattgggcccatctgattcattggacctctctgacccattgggcccatctgacccatggggcccatgtggtgacccacattaccattattgctaccatgacccttgtcattattgtttttactattactgccacccttgccatttttacctttggtaggagggatatcaaaatcttggaagtcaaagtcaattttgtcgaatttacctccatctttctttcctttggtggtgcttttattcttgctcggtgatgcgtcggctgaacctccacctccgcctcccttcttgttcttttttcctaagcctaggaaccgaactaggaagccaccaccatttttgcctttggagttctttttcttgtaccattgttatgattattatcttcacccttttgctttccaccttttgntcttttgaccaccatctcattgcccttta

SEQ ID NO: 5731 - DNA, 774 bp, Glycine max
cgcgcaagcttgactgcctgcagctaattcagggggtaagtctggatcatactcctgaaatgaaatcaattagatgattaacttaattatacaatcagtactcagaaacaccttgggaaattgataaggaaaaggaactaaatttaaaatacaaaagtgcctctacctgctctgttcgaccactctcataaacacggatcttgctttgcattgtagactccaagcgtagttgctcctaaaaaagtcaaatacaaggtttctcagtgtacactaactggtggagaatgttggaagtatgttaataatttaccagctgtttgcaataatctttccagctctcctcattcaggccaaagttgaaaaaatctgatgtatcaatatttggatattgccacggtttctcctcaaaattctcaatatctacatcaaatatagtcctgaaaataattggcaggtttataagcactgaataggtaacacatacatgaaatttagttataaatggagaaaaatattaaaatggaagtaaaagtatcctgtatcagagatgtgcttttgttgtatgattctaactcaaatagattgctacatgtaatatcaaattccatacatcaaaatttatttattccgcaagatagttgtcagagaaaaaggtattacaaagaaagcacattgctacattaataaaaagtagggagtgagcaattatatttatacatcatgggagataaaccacaaagggacagaaaacaacaacaggtttgtcagaaataa

SEQ ID NO: 5732 - DNA, 827 bp, Glycine max
tcatatacccatatcaagagttgtcttgcagcttaattcatagaattcaatctcattgcaatttatcttgcagacaatttttccaatttagagcaaagaaaatgaatggccacaaaaagttgaattctccaaggggagaggttggagagatagacactagggcaccattccaatctgtcaaagctgctgttagtttatttggcgaagtagccatcactagagacagattttctgtcaagagaagatcatcagaggtatgcatcaaatattacataccatttttttcctaaaaaagatatcctaggatcaggatagaggagaaactactgcatggtccgataccaccacatatctatggttcctgatcaatttctacatgacacataatcgagattttaatttatgagaaagttaatagaattcagttgcttgagacatttttgtcatggaaaatgattttcatgctttttcttcataatttgcagaatgtatttgaaaaggagacgcagcttatcttggcccaaaaggaattaaacaagataaagaaacaggtggataatgctgaggccatcaaagccaaagcactttctgagcttgagaatgccaaggagatccttcagagtttgacaagcaagctggccaacgtgagagaatgcaaacaatctgcaatgcaagcagctgaattggtgaggaaccagagcaagcgatttgaaaagacactatcgctaaaagccgtgggatatgaagcttggagaaaagactagacatgcagaaaagcgtacactacgactataactgaactagattcttccaagcagactcaccaa

SEQ ID NO: 5733 - DNA, 884 bp, Glycine max
aatatcttcaaggtcttcttttgacaaatctggagcaatttttaccagcaatggaggtgggccctcctcaccccattgcatttcatcacaagcagcttgaaccttcacaaaaaggcaaattttgctagagtcaagctcccaagtatgcaacacaaaaaactcatggagaaagctttacattcttccaagttctaccttcttcacaagatccttcaattgctttcttccttgaagcatgcgcaaaccaggggtattgggtgatgaaacattaatcacctagaaaaggatattaaaaacattaaacagaatagattaccaaacatttgtcttacaaatttgtagtaagctgcacagatgcttgattaaaaaaaattggaatccctatgtcagttgttttttgccatccatttctcacttttctaaaccagggaattggcaatggaggtgacaacacccttgaaagaaacacatttgttgaacatcaaggacaacctaaaaacataatccttcaaattggatgatcaatcatactactcacatcatgttctggtgaaaggtttgggtgggaaatttggaggatgtaaaaccgttcccattgctgagtttccatcctttcatttctccataatgaacttaaaaaaaatgaccggggattttaagctggcagtaaaggcaatgatcctgggtataaatcttagatctctttagtcattatacaccacaacacttctgttccttagtaaaccaacattttatatagaagatgtatctttcaatatgttagcttttgtatgcaattacacataataccgatatgaatgatgatatgcaattacacataatcaggattatgaatgatgataaccacaactggtaaagttcat

SEQ ID NO: 5734 - DNA, 888 bp, Glycine max
  misc_feature (756)..(756): n is a, c, g, or t
ttatacgccagcttgatgcctgcagattcttctccatctgccaaaatgttaaaatcaattgccaatggtcaaatactcaattctactactcccaatcgccggtagaaatacaaaatgcaagttcaattaagaatatgtggtaatacaagtaaattaactcaacctgagcaagaccatctctaatgtaggtgcgaaatgcctcactagcattttgaagctgagcaaatatgtcaacctaagataaagcactagaaccttgatcaattgagcaaaaatgatataggcttaaggttttaaaatcataacattacatcttatccaaatattaacatgaaacttgaaatgggtgtgtttgtgtttggtactgtggaagaaaatcaaggaaggagagaaattttgaaaataaaggataagtggaagttaaaattttgatttctgtttctagtagtcaaattttctctcccttttccttccactttcttaccaaccaaacaagaaaatgcatagcaatgtgtttcctttcttctttattttcttttcccccaatcaaatataccattaattcttacctttgggtacaattgggtaatccgatatagttcatatagaccaattgtgcaagtttgcttctctccaatcttcttaaatatagcagcaagctcttgctgcaatttaattttaaggataggaacagagtcaagggtaaatagcctttgaatttgcagtaaaatagaatattagggcaaaataacacanataaaaacataatataaattagaaatattgagatatatcaattgctattaggatcgcaaattaaattatagggatcgtaagatcctgagttagccacttctgtgctgactgctcgtggatcattggtgagtg

SEQ ID NO: 5735 - DNA, 1042 bp, Glycine max
ataaagggtcgttgacattgacgtttcctgctcagagtgctactctagaggtaatttggactgtatgtcgggacttattttcttttgtctcatttcaatagttcctgagacattaaaaaccacatttcagctctggaaatcatcatctgagttttgtgcaatgaggtcattgacgatggtgtcccttgcccaacgtttgattagcttgtctcactctggttcagcagccagcaggtatagtggaaataggttatctgtatttccacattttctttgcttttaaatgaaaatcttctaatcatgtcttgcgttaatttttttttttccatggaggaaacccttttttcttctaaactgaacttatctgggatacatacttcaagtttaagctttataaaccagatgaaatgttttttaaacactacaaagtttcaaaatcctatttgaggttctttacaaactggaataaccattcttttacttatatagttccaggtgttatggatctagtgcttagtttctttatgttttgctggtggattcttggtattatttaaaacctaacattgtcttgaagtttttcttgcaacatataaatatgatttcctaatagaaaaatgatgaagaatgatgaaatgaataaaaagaaaaaaaatgcccaaattagcatggccacctgattaatgagacaattaagcttgatattttctttttaaatcttctgaataaaaaaatatttagtgcatgtaggctaaataatggtaggttttccatgcctggttctcatgatgcttgcaaagattctctcctgtttttgcccccttggcccttacttatttgacttttactgtgggtaatggtacttttgtgcagttttacaatatttttccctttctaattcttaattctttaacttatcaaataattagtcaatttattttctcaaaatgcactcaattagaaaaaaatgtactgatgattcatagtatcatatgcagtgcttttagcagccttttatacttcggatttcctggaaaatttt

SEQ ID NO: 5736 - DNA, 839 bp, Glycine max
tttaacatgttgatccctccaaccagacaagaagaaaattcatttgatgctgcattcagacttctttctggtcagttcccaagtgaaagtattgattgttaaatacagtgtctgtcagatgacaaaaaaaaatctcttcatttagagcaccgccatagaatatttggataaagctgatgtttgcactagttaaggagttagctcagcctaaaaggtaaacattagttcataaccttccatgccacctgggataaaccaggtgttcaagaatcaagatgaaagtgcatttatcagtcaatctgtagtcaacaaactcaacctgccaatttttatcacacagcttctcccatgcttggaacactgcttatattggccaaatcaaaatccaggagaacccttttgcttctcactctcaatccagctcttgcccggcaccttcttaacccctctttcctccatcaacttcctgatctccagagcctcattccacttgccaaccgctctataaatgttaccaagcagaacataactcaggtggaagtcgggctccaactgaatcatctttttcgcaatgcgttcagctgtgacatagtctgaacacttagtgcaggctccaagcagaaccgcccaacgcgaatgatcatacctgcaatcagcactctccaacaaactctcagcctcctctatcaactcagcccttcccagaatatcaatcatgcaagtgtaatgcaccaccccaggtctaatcccatactccctcctcatcaaatcaaaataccttctcccctgatcaaccaaaccattatgactacacgcaaaaagaacattcacaaactgat

SEQ ID NO: 5737 - DNA, 876 bp, Glycine max
cagcacctaaggtacgaaattttgatttcacaattcatgattaagtgaagtagtgtatgttactgaaacacaggatttttatgattgtcatttttcccctggatattattttttcctttgttttggcttaatgatgttagttgagttatagattttcattccccttcccccactgaccctgaaattttcatgtttattgtgtaaatcttcagaagagtggaagagcacagcttggtgatggccagcagggtgagcgacctccagagtgcaagcagcagtagatgcagaaggtcatttatgtagttgtctagttttgttggtgttcgagaatgtttgatgtgaaagtgggtttcatgttttaatgcttcttaagttgattttcctcactatatcttggtagttcgaatttgttgagagtcccttctcttattttgcgcctggtagagagaatgtggttataggtagagatgctgtgatttgtttatgttggaatttgtactgccgtgtcaggtatacttgaaatatagttcgtgctttcaactagtaatttttgctgttttaaagaactcgatctacattgttttacgtatttgaagggaagcctctgtaaaggtttatatagtttaatattgttaatgctaacaaacaataacagattttcacgccgattttcttttgctaatatggaaacaaattggattatttgttctacaagtttaaatgttctacaatatttatacacaatgtatattatgagtggaactggtacatttttgttatcagtggggagtttcaaagcaaaaaaaactatttcccaacgttttcattttttggttaaaattttttaaataatggtttaaccaattttttagaagt

SEQ ID NO: 5738 - DNA, 823 bp, Glycine max
  misc_feature (808)..(808): n is a, c, g, or t
taaaaaactatatcaacaaatagttgaataaaaagcgtcctgttaagtgtttaataaatgaatgaaccctggaaatcttacttcttcttcatcatcttcttcatgattgctacttgtagttctattggtttctccaaagtcatcattctttgcaaaccttcctctaactcgaggtcggctatctgccagagttttgcggcaggcatactgcatatttggttgcatcattagttgaacttgaaagtatgcaataacaagtggttgtttataagcaaggaataccttgcatatgcatatgtaacatgataagatttcaattttgtttgatgatgtggctgttttgaagatgggaaggagcttgactgtaccttaattttcttgctgaagtttctttcatttcttttcttcatgtatctattgatcttttctttcctttgctcaacagaaagttttccaaccttgaaggaggagtcctctaagtttgagatttctggtgttagagtgccagaaccaccagccccgggtactagttgctggctctcagtaccaagtgcctaggaaagaaattgcaaacaaaatcagttactttcttgctacgcaaaggaaaattgatcatcacaaactgtcatgaagtgggtcttttctgatgatgatgttgttcgttatcaatttttgtggaatgttgtgattccttcctgctactagctagctcagattttatgctactttttacaggtgagaatgagattataaaaggggttgatatgctagctactgtatggatggatatgggcatatattctatggngcatatcagcttctt

SEQ ID NO: 5739 - DNA, 873 bp, Glycine max
acctgaggtgaggcgtgctccatcattcaaagcaagtaaaacgatttgtagtggtggaggttagaaaaaacttgttgctattttaggactataatcttatgtttggtctgtttagaataaatctttcacgtagtagttcttataaacaattcatagtagccaatgtggatttgctccctcctttatcttcttttttatctgttttttggatttaaattgcagttgaagatatcatgtcatttgatttcagttcataaaccatcagttcaaagctcagtctacaaatcattttaagtaattcatgagttcctccatcttatttattggtaggtatttctcttctattctgaaaacacattttaactagttattctttttatattaataggaatccatgatgcaaataatcttctttcagaaattttctatcccgttccagctaataactatgtcatacaccagtaagttattacttcaaagactttctcatctaataacaataattgaaaagaaataatttagtgttccatttggttcacatacgaaattaggtagtgatattccttctctaatttgcctaggttatggttaaaagtaaaattgtttaacacaactcccccctattagacttaggaatggtgatttggaagagtagatttctgggaacttcaaggggatggcagtttttgctttctgcaaccctgtttgttaaggggtgtacacacaagttaactcatgaacaacaacattatctttgaggaatttagaaaggatttgattcacactcttcccattatcttaatgcaatctttttattggggcccccaaactgtgtttgaatcataaagtaaaagtttactaacaatttgaaaa

SEQ ID NO: 5740 - DNA, 834 bp, Glycine max
aaaaccaattctccggcgacatctccggtcaggttccggcagcctctccggcgactcggcatggcaactcaatgaatgcggaatcaccgccggggctcctcatgtcggtttcctgcctctccgactacgacctcctctgcggcgaggactcctccggaatcctctccggagagtcgccggagtgctccttctccgacatcgactcctcacctcctccgccgtcgccgacgacagaggattgttattcgatcgcgagcttcatcgagcacgagcgcaacttcgttccgggattcgagtacctgtcgcggttccaatctcgctccctggacgccaacgccagagaagaatcagttggatggattctcaaggtaaactaagaaataactaaacaaacataaaaacaaataactgaacaaaacaacactaaaaaactttcttcaacaatcggacatgcggttgcgcttgtattacgttattgccactcaactcgccgaactgctctacgctaaaatgcaccgctggtgtaactgtaaccgtctcttcttcgtaacggccttctagtatcttctagatctgcgtcgtacggagttcactgcgggttgacggcgttagtttttttttctgatttgttcatgcgaattgattagtgactgtttgatgatgcgtgtttcgcaggtacacgcgtactatggctttcagcctttgacggcgtacctcgccgtcaactatatggatcggtttttggattctcgccggttgccggtgagctctcgtttctcagcagctttaaatgtttaaattaaatccaaattttatattatatacatatatgtc

SEQ ID NO: 5741 - DNA, 793 bp, Glycine max
  misc_feature (672)..(672): n is a, c, g, or t
agtgtggtactgggcttttcaacttcctgtctgtctactcatgtatcatatttgtgtaagggggttcttattggcactaccacaattcatacaccaacaaaccactattttactcccttcctctttcacaacacctccaaccctttaacatttatgacatgttgggacgttgttatagttttataccttttctaacagttcatttttcttctataaatacgctatatcttctcacatgttttcagatacatccaagtctctttacaaaaagttcttaactacatattctctttcctataatattttctcattttccatttcttcatttttcatctcattgactctctcagtaatccaatatgtcatcgaattgtgtgaatgaagaattaagggagttgtcactataaaataggccattcctctacgagaaaatccccaagtttttgaaactttcaaaggtacactaatagatcaaaagatatttagtgtatatcaaataaaactatattaaaattaaggaggattaatttgttattttttaattgaaaggttgttgttttcaaaaatactaaatacgaatacaaaattatttgaattttatgatttattttctatccaagttataacattgacgtaggtaaacgtgtataaatttaaaacatgtgtatgttntttttttaatgttaacatgtacttaaattttagctttaatcatggactatttgaattttatgatttattttctatccaagttataacattgacgtaggtaaacgtgtataaatttaaacat

SEQ ID NO: 5742 - DNA, 773 bp, Glycine max
  misc_feature (653)..(653): n is a, c, g, or t
  misc_feature (663)..(663): n is a, c, g, or t
agcccttcatgacagttgaattacaccttcgttgatgatgaggagctccagagaggggacgaaataacgtcagaacttgcgaaggaaattgaagactccagatttttcatcatcgttctctctcagaaatggagcaggatggatgaaatggagaaaagcatcgggggtgttatgtgatgcaaaggtaccgatcaagctaaagggaaagttttatcggactgcggtaagaccggcgattttgtacggaacaaaatattgggcggtcaagagccaacatgagaataaaataggtgtagcggagatgaggatgttgcggtggatgtgtggtaagactcgacaggataaaattagaaacgaagctattagagagaaggttggagtagcgcctattgtagagaagatggtggaaaatagacttaggtggtttgggcatgtagagagaagaccggtagactctgtagtgaggagagtagaccagatggagagaagacaaacaattcgaggcagaggaagacccaaaaagactataagagaggttataaaaaaggatctcgaaattaatgatttggatagaagtatggtacttgatagaacattatgacggaagttgatccatgtagccgaccccacctagtgggataaggcgttgttgntgttggtggntggttggtctctctcagaactatgcatcttcctcattttgcttaaacgtacttgcttacatccttgagtgcgttaagagaaaacgttggtgggttttgccaattttttac

SEQ ID NO: 5743 - DNA, 852 bp, Glycine max
aagaatatgctggccaagtctgtttattcaagccaaaaatcatgagagaagcttggcacatatacaagaaatcacactgcaatggaaggctgagaggaaaatgttgactaagaacacgagttacatggctgctgccaatgttaacatagcagcaagtacacaagataagtggaagtccagcaagaacgacttagcgggaagtgggacctagccataagagaagtcagcaactgggatagtcaaggatgttccttctgcccccaagaactcttcaaaaacgtttaaagcttttgctgggtttgattagccgttgaaactctattcaagggagatcctacaaattcttgtagtcacgtttggtgcctataggaacgtgtgcaatggataacaaaatgttaaaacaaacacaaactttaactgtagaagaagcatctaaacacagcccaaaatttttgtttttactgcaagacaaggatactatttgattgatcgtatgagcaagtatgcccattttgtggcttttttgcatccatttgcagccgttaacacttgctcagctatcaattctatagactacatggagcaccagtatagataattagtgataatgatcctgttattgagagtaacttttggaagaattcttcaaaaattctttggggattgaactgaagattttcctcttaccatctcgtttgaagtacaaggcccttgagggcaagggtcctttttggggaaggggtattgttatgtaaacacaaataggataaggaatgttatcagttagttagccagctaccattaaatggatttcatagctggttgggtagctgcctataatagagcagggcc

SEQ ID NO: 5744 - DNA, 879 bp, Glycine max
  misc_feature (773)..(774): n is a, c, g, or t
  misc_feature (784)..(786): n is a, c, g, or t
  misc_feature (803)..(803): n is a, c, g, or t
  misc_feature (819)..(819): n is a, c, g, or t
gccagacttcgctgccttgagggaatagaaatggttagttaagttgatttgtttaactcggcaatttcttccaatcttttcaggttcattgagcctacaattttgttagatcctccactagattctgagataatggcagaagagatattcggcccactgcttcctataatcacagtgagaatcaacagtcccattttatgttttcaattctcacatatattgtgcattgtctcattcaactcttgttgcacttgcaatctgtgcagttggataaaattcaggaaagtattgagtttatcaatgcaaagccaaaacctcttgccatttatgccttcaccaaagatgaaactttcaagagaaagattctatcagaaacatcctcaggaagtgtcgtatttaatgacacaatggttcaagtagtgcttttatcttccttgtcttccctaacttaactttcttttcataataagcttttatatatatatatatatatatatatatataaaaggatctattcttcttatcatgattctttttcttaagatttaataattaagattataatcattagatcttaaaaaaataaatgataaacacgagaaataattctaaaaaaattattctttgagtaatatatatatatatatattatttttggtttgttctgagttttgttatagacttttgttgtaaattaagtgatgatattatatcatgttaaaattcctttcaatgtatatctgtcgttggaatggtatcatgtcatcactaannaattggacannnacttaaatatttaaaanaatactaggaacttanaataaatcacgtatatataaaacatctaaagtattttagtctatcaagtattaaactcgc

SEQ ID NO: 5745 - DNA, 860 bp, Glycine max
gggttttgtcctctaaggaaattaacttcccttatcctttgggcttgactctacttacatggtcttctcctctgttctgtgttttgtgttaaccaagattctgaaggtacgggtttgagcttggtgtattttgttatttaatcagttactgttatgcaatgcaggttaatgatctgtttcttacaggttatgaaggttgaggagggaatgactcctgaaatgtgagtaaataatgaagcattctgtatttaatagttgatttataccaaggttttatgaatggaacaattttggttgtcatactttctctggcttttggtgactcatgatatgttaaaagttggatcttacgacattttctaattgagaataatattagccaaaaatttcaacatatggttgtgtgcctgtcaaactcgagagtttacgtaagcttgtggagcttatgaaagcacttggttacttatatgttacggtcttctactttttaacttgcgtataagattatacattgataacaagacttagttatgacttatgattttgtctttaagagacttatggttaagttattttgttgtttccctgattaaaattattacattgaccaccgtacatcatttatatgttatacttcccatgattgttcattgttctttgaatcttttgattaaatacaattttttatttgcaactcaaaaagtagcttgacagttcttgatttgaatttttttccagtgtagagcaatttaagagtcaaatcttggttttgaatgcacttattgagcgggtttctttctttcatatcccaattccctggtgaaacacatgttacttgggatataccatgataattttgt

SEQ ID NO: 5746 - DNA, 827 bp, Glycine max
tttgctgcttgttctacttccaagggatatgtggcccctggtattgttattcaatcattactcaacaaaattagcgtatattacattctcatgttatgttcatatatttgaatttatttcttgctgataatttctagcaattttttgggtttgtctggttacaggccttgttggactttctctgtcttatgctttttcattgacagcaaccgtagtttatctgactcgaatgttttgtaacttatcaaactatgtaatctctgttgaaagaatcaagcaattcattcacataccggcagagcctagtgcaattgtagaggataatagaccaccaccttcttggccttccaagggtagaatagatctccaatctctagaggtaacgaactaaccaaatatatacttatgtgattgcgtctcttttccacctttatccatgttcatgacaaatgaattcaagtctgattctctgtacaacgatttcagattagatatcggccaaatgctccattagttcttaagggcatctcttgtaggtttgaagaagggagtagagtgggagttgtgggaaggactggaagtggaaaaactacacttataagtgctttgtttcgcttagttgagcctaccagaggtgacattcttattgatggtattaatatctgctcaatagggctaaaagatttgagaacaaagctaagcatcattcctcaagaaccaactcttttcaagggcagcattcgaaagaacttggaccctctatgcctgtactctgatgatgaaaatatggaagtaaatcaactggctctacaattgaaaaacatgta

SEQ ID NO: 5747 - DNA, 815 bp, Glycine max
gacagaacacgtaaataaaaaaaactcacatttctcttctgttttgtgtggaagattttagggatccactctttttttttttttaacttctccgtacttcatgcttgccaaaccgttgaaattgattgaaaaacataacttttctccgcatcacttctcttccatggtatttgaccactttcaaacacacgctaaggatgtgtttgaaaatctgtttaaatgggcatcgatcgaaaattactttccaatgaataaacgaaggagcaataatgtggtattagaatgtaaatttagttgattggaagtaatatcttaacatactctaattcatcacactactgatatatgatcgttcataaatatatttgtgctttctttctttgaaactaatggtctaacttgcctggatcagcgaggttgcatttctttacaaattatttcccagactcaattttggacattacaaaatacaaacaaacacttaaccacgcaaacttttataaaaatacttctagtttgtgtgtgcacccgtgtgcgtataaccctagcatttgatgaaataagtgaaattcatgcccttttgatttctttattctatttttttaatctaaacacaagttgtgtgtcgcatgctaaaaagggtgaggtgagtctttgcgtgagagatgtactagtacaaaaggtaagtgcttatgacccaccggtaaaacacatgataaaagctttggaacaaaacgccaaaatgtagcaggtccaaagtgacatggtttgatatccatcataaacatacaggcacatccacagcatcgatcatg

SEQ ID NO: 5748 - DNA, 800 bp, Glycine max
tggttttattggaagcaaaagtgattcatctttattcatttttcgccaacaaattcatgtttatctcctggtctatgtggatggtataattctaacaggtagttcaccttcactaatacatcagattacatacaagttaaacactgctttttcactcaagcaacttggtcatctagattatttcctaggtctggaaatcaagtatctacccaacagttctatccttatgactcagaccaagtacattagagatttacttcacaagactaacatggctgttaagctcactctatctcttctccaatggtatccaactgcaagttgtctcgacatggtgctgatgtttttcatgatccaaccttatacaagtctgtagttggtgcattacagtatgctacccttactagacctgagatcagttttgctgtcaacaaagtttgccaatttatggctgctcctttggattctcactggacagtggtaaaacggatattaaggtatctgaagggcactttgtttcatggtttgcttcttcaacctatatctgttacaaagcccttagttattcgagccttttgtgatgctgactgggcatcagatgtggatgacaggcgctctacctcaggaactgctatttttcttggtccaaacttaatctcttggtggtctcaaaagcagaaagttactgtcaggtctaatacagaagctgagtatcgcagtatagctcagacttccactgaattaacttggattcatactctgctaacagaattgcaagtttcattcactactcctgttat

SEQ ID NO: 5749 - DNA, 849 bp, Glycine max
gaaaaacttatttgcgcatgaggttgttttaaccaaccatggatgtattgatccaagagttaccaaaagctctagctctagagggtaaccattgcactcgtccactctcgtgtgtagttttggcaaaatctcacgctgcttgtcagttgtattcattagcaacgtgtagatttgtaaaccaggagcactatcaaaattttcactctcataaacatctacaaaaccatttgtggtttctctcaacatgtttagaccctgcatcctctcatttccaatacccgagtcaattttcttagcaattttatctaagaacaattttctagctcgtgattctagcaaatgacctgccttttctactgttttgcttttccttctggtaatcgggtctaatgtatcaagcacttcggagataaactttggtcttgccaagcaaagtgtgttgaagtattcacaaaaattgttctgaaataatgtaccggaaagtagtattcttagatctgttttcagtttcatcaaccctttcctcaaccttgacttggtgcttcttggattgtgcccttcatcaagtatcaagatcccaggaccttccctcaatgctttagccatatattttctgtgtgcaaactctgaaccctctctcattaatgctaaaaatgcagtatagctcatgaccaaaacacttggtttctcttgccacagttttatcttttgcaagcagtccaaaacatgcttgacatatttatttggatttgggaaaacccaggaaagacaattgaattttgctcagtatctttctgagttccaccacgcccatgaatcagatacactggcatagaaattcccacttgt

SEQ ID NO: 5750 - DNA, 811 bp, Glycine max
aaagagaagcaataattattaatgtcattaacacacccctgaggccctgaaagctatttcaaaatatcaaaataaaataaggtattttatactttgaatttaaaacaattgcatgttgctagaatctagataaacacctcaactgtcacaaagaatgcccttatagaacatatatacctattactggtacaatattttgtccgatcatttatataagaaccaagttttagtgcattttttcttctaaaattgtttcgtataaaaatgatcaattcactaaaacatttttcttataaaaaagaccatatatagtaatatttaccttccttaaaaaaaagtactatttacgtggccttagggtgattgcagctctttaaatggatgaagaagaccatttctactggagggtgctgttgaatcagtaatttatgtcccagaaaagggatactcaacaacaaaattaaactagaactcagcacagtagtctaggttaagtcaataagttgtcatcactcatcagtaaccgcataactgtgcaagttcaactacgtactagtgatctactaccaccctcaccagtagatttgtgcagtattcacattagtgaattgagatggctcacctttgaacaataattttcttgtcagcattgagaaaccatttccaaaacatataataaacaatagtttgatggtgtggatttttttcattgtaaactattgtaaaatcgttcttaaaatgagcatgtgcaacaattttttaacagttggcaattttcttatcaccggttataaagtatgaacattatttg

SEQ ID NO: 5751 - DNA, 853 bp, Glycine max
  misc_feature (794)..(794): n is a, c, g, or t
ggtatgggtagctaataattttgttttgtcttgaccttgtttgtcaggaattcctaaaattatttgaagtaatttaaatttctagtttcagaaatttgaatttttcttttatcatctgtcaaaaagaaatattaagaaaaaaccaagtctcaaaatgctttttcatagttgaagatgcatgtaattcagttaaagtagtagattttaaagaagtctcaagttaggtcaccaccaatcatcatatattaacaattctgcttttgaataccctggcctgaaatgtttcgtgatcaaattatatttctcctcaactcttgtgtttaccatgggtgaagatatatctaattcatatgttactagatcaagaagaactgtaatagttgtcaagttagcttaccgtatattagtaattcagtttttgttacatctggcacaaaatgtttcttgataaactgatttttgttattaaaaaccattactcacatttgcttatcttagtcaattgcatgtattgggagaaaagatttcctcaattgctgagctataagcagatgcaagacttaatgagccaggggtgcccccttgttggaatagcagacataacgtgtgatatagggggttcaattgagtttgttaaccgtgctacatcaattgattcaccctttttcaggtataccatgtctctagtcaggggaaactaatttattttagtctcatctactctattctaccatgaaatttatcttagaaagagataatagttttgctctagagttgctgaataatcgcgttgnttcaagcactctgcatagggtacattctattatgtcaagaattatatatggggccaagg

SEQ ID NO: 5752 - DNA, 889 bp, Glycine max
ttgcatgcctgcagttagtgacatacataaaatgcatcttgtttgatctcggatggacaagctttaagtttgctcttttaactttaagagttggttttggaaaaaaaacattactattttctcagtattgcatgctaggagaatgaaaagctagtctgcaaacttgtctaaatgttggttctgtaccctgaaaatgctgatgctgtagatatctagttccatttatgccttaataatttacaaatatgagcgagttttaataaactcctcaacaagtacttgtaagacaaacaaaaataatatgaaaagttctcgcataagttaaaactaatttatgcacctcaactttttcataagttcccccacagaagttgaccaagagtcattcaattcatgatcatattctattatctatgctcttccactgtagttgtagaacaagcatatcttcccttcctctgttaccaataatatcaggggaatgtttaagaaggtggactagaatcacataataaaatgctcactacttgataatggaaccactgcaatggttcgaaaacaagccccattcttgttccagggaaccatgtttattaggaaaatcatttttggggaagatggaatgacagtcttgtctcatcttatcttgcttaggactttatcagctaacaggatttgaaacaagatattaaagaaattcatctagcagctatgatctggcagtatggctagagccactgagctgcattgttgaatccagttttttttccaattgaactcaaatttgaaataaaatggattttgtatctcttatcagtcttatgggatggttccctctacatatagttctaaacataacttttgcagattgtttgcagttggtgatgag

SEQ ID NO: 5753 - DNA, 846 bp, Glycine max
agcttgcatgcctgcagtaaattcagacacgtaaaatcgaaattcaaattaacacttactgatgaattagaaacatccattgtgagtaaccataaaactcttaacttgatggcatgattactacacttgtttgtctttagtctctcgttgaatccagtggatataactactgtatgaatgtacgtggaggatagacatttgtccatttgcatgtaaatctctttttagtgggagacagatatgattttagttagtttccatttgttagctagctaggtggatggcagtgatttggattgtacagttatgaaacatctgtcccaatttcaaccataaagactgtctgattttgttataagaatatacaagagtatataaaacttttttcacttcaatgtgaatgcatatttttttttctcaatatataatattaatcctagcccaagcaagagagattaacatcactttcatgaagagggaaaaggttgatattaaacatgtacagagggaatcaaggaggcacagcacacaagattcatgtgagtggcatggtaaaagacaccaaattaaaaacaaaatataagtccaagtcatgaagtgaagtcattgacaacgtcatgtagctttctttccaatacttgagagcaaatctggtccatggtgcggtagaaagagagcagatcagacaattgctccactgacatctttccattacatttttggccattttttcccttacttcattcagcttcagtctctcaacgtatgaccctccattcctaactgttgcccccatttgctttaccgattctcttgttgcacactaaacgcccggtttgactgcaa

SEQ ID NO: 5754 - DNA, 768 bp, Glycine max
tggttttgttgggagcaaaagtgattcatccctatttatctattggaaacaaatgcatattgtttaccttttggtctatgtagatgatataattctcacaggtaactcaacctctctaattcagcagctcacaaataaactacacactgcattctccctcaagcaacttggtcatttggattatttcttaggtctggaaatcaagtatttgtccaataattctatcttgatgacttatagagtaaatacattcatgattttcttctccaatggtctccaactgcaagttatctcgacatggtgctgatgttttctatgatccaactctatacagatatgcagttggtgcattacaatatgctacccttaccaaacccgaaatcagctttgatgtcaataaggtttgtcaatttatggctgcccctctagactctcgttgggcagtggtgaaaaggatgttgaagtatctcaaaggcactttgtttcatggcctacttcttcagtctacttctgttacaaagcccttggttatttgcgcattctgtgatgctgactgggcatttgatgtcgatgacaggcgctgctatatatttcttggtccaaatttaatatcttggtggtcttgcaaacaaaaagttactttcaaatccagtactgaagctgaatatcgcagcattgctcaaacttccactgagttaacttggattcatgctctactgacagaattacaagttccattcaccactcttgggggatcttttgtgataa

SEQ ID NO: 5755 - DNA, 792 bp, Glycine max
  misc_feature (649)..(649): n is a, c, g, or t
gatcgacctgcagcaattaaaatgaaaactttgatacgttaaagtgcatcaaatatgcttgatacgttattgtttctgcatattaaattgataaataaattccaacattaaacgttccttttaaagtgcggagaatatgcacgttattgttttttcttcaccttgatttgagaaacgaattttgagcagtcatatattcctttgcaataatatatatatatatttaatatattattcattaaagatattatcctagtaagtgcagcaacgaatacacatgctttttacttttcatgttatgcacatatatatatatatatatatatatatatatatatatatatatatatatatatatataataaattagatgttgttgtgaaattattattttactgctttggagaaataaattaaatattttgtgaaattattattttattgctttgtagaaatatattaaatattgtgaaattattattttattttattttatttagttatatatgtataataataaattaaatacttttgtaaaattattgcttaatcataattatttatgccacatctcaaattaattgttgtagatgtttttatttatttattttgttgaattaatatattcggtttaatctatattttttgnttgtgtcaagtaaatgttactattgaatgatatgtgtaggatgcatgaaatacgataaattattttattatgaaattatggttgagactgtgtgtgtaagtgataatcatttagtacgtaatggattgtgaattacataatgt

SEQ ID NO: 5756 - DNA, 838 bp, Glycine max
aaattacacatcctgtgaaattctgagtgagagacgcgaatctcaatgggaaatctgcaatgatccatggatggatcaacagtagtgatcaaacctagacctccaaagtcacagctttcagctctctgatcatgctgctgatagtaactattaaaagcatatgatatgttactaggccagctgatgttaaagcaagatccaccaggagacagagcagtacaatcagcacttgcacaagcctctaaagcactggcagttgcatttgacaagtctttattgttgttcacaacacaccacttagaagagagatactcaacattttgagcattcacgaggctctttgaaccttggccaagatccacatggtactttgcttggccgtcaaaagtgaacaaaccccaatgcctttcaaagtttccagaagcaatgctcctttggtcctcatcaagaaggctcataatgtatgtttcaagtggtggcttgtgtggcctaggtggggtccccaagttactatgaaggtggtttataaggcctttaatgaaggtttctgcaaggtatgaacttccattgacagcaccatctgttggccaaccaatcttcgccacgacaatgtccatattaggatatcccgctgttgataatacagtaaccactgtatcatagcttaagtcaaagctgtttttgtatgttttatggctaaaattatgagggcgtgcagtttctttgaagagggagaaatccagcgaaatgtttttggtttgaaggtgggttacgaatggggaaaatggtcacaaagaaaagtgatccatgcttatcaagaaaatgtgaggagctcaaa

SEQ ID NO: 5757 - DNA, 853 bp, Glycine max
ttgcctgcctgcaggaaagttataaggtggtttttcgaaatcctaatctacattttctttctgcattattaattttctcacttgtttactgtaatatagtaatattttatatatttccctctttcgaacaaaagattctgtttcaggggtgtaaagaaactggctttcgatcattatctccaggtacgtcatcatgtccagcttcatcttattagttgtttttatttcttggtcgttctcttaattagttttcaatctgaattactattataatatagagagagaatgacgtaagatcaatttaaagtattgcaaaaccatagctttcaattgaatttgaatatgaccttaattaagtaacgttacgtagcacaattgtctagtcgggattgtcatgtatagcttttagcttattactggtaacattaaactaacttatgttcaccaaaaagaacaaaaactaactatattgataaatttaacaaaattgcctatgcatcttcaaggtataaaagatatttggatgtagattactgatagatatataaatatcttgtaaaagtaattaataaataagaaaatcttgtgtcatagaaaatataaaaaaacttgtagtagaaaaattgatgtgccagctagcagcagtgattacgataacgaacccgtattagtctacgggtgctctttcctggaaaaataatgacaaacccaaattgtaagtttgcaacactttcactgtggaaattcgaaaccaaaccactgtaatgattatgaccaatctctttaataatagtagagaaagaaaggaaagtagaaacacattctataaggaagcccaattttcattttttct

SEQ ID NO: 5758 - DNA, 843 bp, Glycine max
agcttgcattgcctgcaggcataggagatggagtcatttcttcctcaattggaagagtacgttttgagccttctatggcaaccccgagtagaatgttctcttccaaggatggcctaactgatgacagagggacagaagatttctcttcatcttgttttgattgcgaagaagttgcagaattgatctcgtgggaagtaacaggagaggtttcaggcgcagcactttgaacaaggtttttcgatacaggaactgtaggtccctttcctgcatctactgcattttccttttttggctgggcttcagacagtgacttggatttatccttggaatttacatcaggtgaggaggttaatgttgctgcaaagttctcatcttctttggtgtcagatgccatggtttcattaatcttgaaatctttttcctcacttgcacgagttgaacgtgttgaaggcttagttttatcttcaccattaactttatatagtggttctatcagtaggaatgggcgatttcccgcactagatcgagtgaaaatggtgtccccaaagggtatattttctgagtcagcctcactgtatattttctgaacagtgcggatgggagtggctagcctggctcgatgatgactgacgactctgagaagatccaaaaggattgcctcctatttttttacatgtaaatgatgttacaaaaagaaaatattatgaatataatgaataatgatcttataataatgacttgcttacatccagaaactaagtttccaccataagcaactggaattactgggtatatcatattacctttacacagagatactcctcaaatggagaagttttcaca

SEQ ID NO: 5759 - DNA, 851 bp, Glycine max
taatatgaagtaaaagggtgtgtgattagatagtgcatgagagtgtatctgtaaaggtcagtagggctaataagtccaaccaaatatgttgaaagttgagataccagttagtgaaaccactatgcaacttacaatggctgggcatggcatctgtttttgtgagaatgaattattctacctaaatgcttaaccaatttttattactgatgtaaccttgtaagttgtaacctttcaagggcaagtgtttttatgattgaatgcattgggttagatggtcagttaatagtatcagcagcacccacttaatgagattggacacaggttccatttttggtctatgaaatatgctccaaaatgagtttgagaaaagagaattaaatattttctgaatttgctcgactgtattatccacccagtagaatggacttttttattcaagagtattacaaagataattaatgccaaaaaaaaagttacaggagaacaattaagatactgctacttcctaagatgcaatgatgcaatgagcagctatatcaagtatctaggctacttggttttcaatgaactgagaaagaggagagaaaactaaagaaaaatgtaactgatattgttgtgatctgaaaagttagttagagttagttacaacatatatagacctctgacctactaaactaacactaacagattctgactccctaatcctagtgaggtgcagttagtcgaagctaacaactcttacaaacatatagtcttctgtctaacactaaggggggggctgttagcaaaaagctacaggcccttcaatcattttacaaaactgttttcacagctgtacaattacatactct

SEQ ID NO: 5760 - DNA, 838 bp, Glycine max
agagacgatgttgaactcgttgccgttaacgaccctttcatcaccaccgattacatggtaacctaaaccttctactttgatctctataatagaatatatgccttttgttcggttatggttcagatcgttagttacggtgttttaatttatttatttatttattgtaaaatcttagatctgattgttaagtgtgtttggttgcgcatgtagacatacatgtttaaatacgacagtgttcatggacactggaagcatcacgatgtcaccgttaaggacgagaagacccttctcttcggtgacaagccagtcactatttttggacacaggtttttatttttcactttaatttttcttactgtttatgattgttgtgtcctgcatgtaaacgttgagtgttgttttctctgtgaactcagaaaccctgaagagatcccatgggggtcaactggagctgacatcattgttgagtccaccggagttttcaccgataaggacaaggccgccgcacatttgaaggtttgtatttctaccactagcctttacttatattaactattttcatgcgttattatttgctatgctctatgcttcatgcattgtgtatcctaattttgcctcttatttttcaaatattgaagtggtttatcaatttttttggatgtcatgttcctataatagttagtgtagggtagaatgttattgaagatttgaagttgatgtgtctgtgtttttattaattcagggtggtgcaaagaaggtttattatttctgccccccagtaaggatgcccccatgtttgtgttgggtgtcaacgagcccgagtccagcccgagcttga

SEQ ID NO: 5761 - DNA, 897 bp, Glycine max
tggactcgttttcttcttccaactcgaaacagagctcgcaaaattgaaagcgattaagccaaggttttggagagatttcaatggcaaaggaccctcaaacttgcaggggctagggctagggctagggtttgcatcattccatggccattttaagcaaaacgcaggttgcttgggtttagcattagggttagggttagggttaggaatcaaacccatttcgtttccggcaacagggacagcatcatcaaatgatcaacatctacaacactgcggcagaggagtggactgtagcagtgtttaaaacttaaaatataatactagatactgctcaattttaattattttaagcttttacttttaattttactatataaataaaaaatcttaatactcaattcacctatcaaagaaccatttcaaaaaatattttgatgtaaaattaaactttaaaatgttcaattaaagtaaaaataaaatgaagatgaaattgatgttcaagtatattttacatggattcaaatgttcatttattcaacattataatataatatgagaatgttttatactttaagggacaaaatgactttttttattaaaatatttatatttttagggtttactaataatattttttacaatattcattaaatttatttattccctaattactataattagttcaagtcattatatgacgaattttaatttacaaatttatagtcattgaaagaggataaaaaatgtaaccttcagtcattttatttattttaaaaattttatttttggttctcttaggcattactttataaattttggttggttttttataagattttttggtatccgtccttactattttagtaatattatttgattattcattaactgctatctata

SEQ ID NO: 5762 - DNA, 921 bp, Glycine max
  misc_feature (884)..(884): n is a, c, g, or t
attttaatttctatcactaaacaaagtccttgcatgtcataatttttgttttcttatatttttctctatacagttgctacattcaattcggtgatttttttctttctcaatttgaaaacttgatttctgagacagttatgtttctacgaatttgaatccgcaggaaaatacaggaaacttgtttcttgctgattattttgcagaatttacagaaattttccatgtaatgaacacttttctagtagtatacacttatcctctaaagtttaaagtaccattttacccttagtcaaaacaaacaatatcttgaattcaacaagcctaacaaattaacaaagcaatgaatttaagtagaaattaacactaaaaggagggattaggtcacacatcaatttgtcatgccctgtagtcccttagccttaacttgggactgtttcattgctccaaaaatctaacattgaataagaattaatataaagaaaagcttgtaaatattgttttcccttaatccatcaagatatcttttgaaagataaaataacgaaggtccaagagagctcaaatacacaatataccccagatgtggtaaatctatcactacaatagacttaattaagcagaacattgacattattgaaggcaagtttaggtcacatatgaggttgtttggtcctcttgcccgttagtctcaactaagaatttttgctctatgccatcaaaggtatcatattaaatagaatttgagtcaggggcagtaaacattttcttatcttatccaaccaagatactttttaaaggacaaatggttaaggtcaaataagagttgaaacagacaacacttcaaacgtgacaagtctaatatgcaatgaacttagcaaaaaatgncattattattgcttaataaatatattgcaataaaatg

SEQ ID NO: 5763 - DNA, 834 bp, Glycine max
aacaaacaaaactaagtagcttaagacaaagaagaacaacaaaagaacttgcagttaccacttttcaatgaacagaaaaagcagaagagcatatttgtttttagaatcctcgtttgttctacttttctcatggctttgaacacgatgatgcttcaatcatggccttttatgagccttgtttttgttttacttttgcacagtttgtcaataacaccatattgtcattgccaaaccagcaattctcctcctcaaaacattgaaactttctatcctaatggaacttcagcaacacaacaacctttgccgccaccaccacagccacaacaaccaccgccacttccaaccgctaacgtagcacctagccgcggttcattgaaccataacatagcgaccgcggtggctgcaactgcggccagcaccatagttgtttgtggtttaattttctttttggttcaaaggtgcttgaggaagagaaggagaaggagagaggagacaagaagtaacactgcaactgctgatggagatacccgagttgtgcctcagggaaatgtgtttgagagaattgatgggaatgtgagggggttgatcgttgatgaggatggtttgggatgttgatttattggagaaagcttgaagggaagaactctaacaaggatcttctacataaggaggttgtgagtagtcctagaaacaaagaaaagcagaacatggtcatgatgaaaatcaagtgaagaaatccaagtccatcccaagtggttccctctgcttagaggaaaatcttcaacttctcacttgaatgtatctccagaagaggatgagccatatagattttcg

SEQ ID NO: 5764 - DNA, 823 bp, Glycine max
agttattatgatcataattttagactatgatattatgataataattttagactatgaacaagtaaaactagccgttaggatcattaagaaattttgcaacatttgactcattctacctcaaacctcaaacttgaaccttaaaccccaccaccaacaacaacttttcttcactcacatgtccttctctcttttcactctccacttcccttcttgtgttatttagatcctcccctttgttcttcattgtactacactactaccactactactattatctgctttaagaagtgagaaacccaaaaagagagagtgcaagtggaacctgttcgtgtcttactttttttttctttcttttgcttagccattgtttgttataagttcccacttacttaccactttcatgggacacaacaacacttgtcatcatcatgtcaaaggtttccacgcagacccttttagccatagcctctcttctgcttcaaatggtggtgataggaggagaaaatgtgggaacaatgaaaaaagtggtggtagtggtttcattttcttacccttttttctgtttcttttgatttccacttccaccattcagcatgtttcaggccacttgtgggatggggtgggttgtgactcaggctgattttcaagcccttagggctattaagaatgagatcattgacatcagaggggtgttgaaaagctggatgacagtggtgtaggtgcttgttcagggggtttgggctggaatcaagtgcgtgatggtgaggttattgcattcagcttccttggagagggttgggtggcagaatctctgaaaaattga

SEQ ID NO: 5765 - DNA, 867 bp, Glycine max
acccggtcttcctctagagtcgacctcgcagctgcactgctagcatcgctgttcttttcagccatgtcaagccttattatgttatgactccgctcatgaggcacactgtataaccatttttgtcttttttggcaaaatgaccgcacaacccttcaatttctcattatttcctctttcttttttcatgaaatttacttactttttaacccatacttagatccatagtagtaattaattatagataagtggttgataggagtggtattgagtttagtttctttatgtaagttttcaaattcgaatattatgaatggaaactaattggaagaattttttttttattaaaaatggttaattaaattttttaataaatattaataattattaaattgaatgaatatttcatactaataacataattatcaaaggaaaatatcaattaacagaaaaaggaaatatatgaaagttctttattttggttttcttcaagaaaaaataattcaagaatatattttatttgtggttctaatcctctagttcaacaggaatattttgttttgactaatataaaatttggtcaaataacttgtttggttgaacatagaaataatatattattatattcttataaataataattaagatcagaaataaagtataatatcaaacaatttaatttatgcaatctataatttttatacgttacttttcctttcatctaaatctctccaattttgaagaagagaccaaaataagaggaaaaaatattcaacccttgcaattttttttctccccttctcttcaaatttctaactaatgcaatttttctttttaaaaaaaatcttttctcttctccttcattttctt

SEQ ID NO: 5766 - DNA, 827 bp, Glycine max
catgctctgcagccatcaagaagcatctgaatggcattggcatctcgcatcactaccgactcagtgaaaaccatgtcagcaagtgatgatagaagcttcttttgtatgccataactgcataagctccaaatttttaaatccagcaacagtgaagtgaagagctgcactttgagcatatggttgattttctgagatagacaaagtgagacaactgcaacaacaagttcctcatcaccaacaccatcatgcttttcatcacaaagtgaagacaaggtttggagaagataatttaaaatctttgaaagaatctcaggtcctttgcaacgaaccaactcctcattgttcctcggatgttgagaagccgtcgatataattcgaaatattggaccagcaagagatgtagtggctacagacacagaaatattcccttgccgtggttctagagtgtcctcatgaatattgcaaattgctaagggaagcaaagataatggaccaccaaaagccaatgcccacaaagcatctacaggtcgaattcgtgcagcaacatgaacttgcccaagaacctcagctgggcgtcgaagcagacctgaatcataataaagagaccatccataataagaacagaaatgcaacatattttacatgacttgatgcataaaagacattttatcatggtatgatggtaaatacatataattatttgaataacttaaggatctggattttaaatattgaaatatttttcacataattatttccttagaagtacttaaaggacatagtttgtcaatagaccctgatttatgacataacattatgggcgtcat

SEQ ID NO: 5767 - DNA, 873 bp, Glycine max
tccaaatttcttttagctgattggagtgcaggcatataggaccgagtttggctggaatggattggcttatatttgaaatatcagcccaccagcattgatctatccctccaatctcggctttgcaaggatgcttcctgcatcttccaccagtccgtgactgtgtccctagtagacatttgaattttttgaggagcttttagagcacatatactgttgatcatgaagagtaaattgaggacctcttcagaggaaatggagctaaagaagtttgtgcttgacttggatgaaggtatgtgttagtatagtatatatgaaaaatattttatcatattttatagtctttgattatcctttgtttccttatttccttattatcttttagcattgtttctcatatttcctatcttatcatgttttgttttcccaagtaattagctaaggttatgtttcatattaaaatagggttttgtgctttaggttttatgaacacaccaatacattgtaatacatctcagtcaaatatcaattagtgtttcattctctttcatctctcttactccctcttattcctaaaactctattttcatggttttagagtggtaccatcttttgtgacctatcttgtcactgcaccgttgctaagctccctaaaatttggagttctactttaatttcatggttcttctgtcaaactaatcttctcatgttgtgtcaaccttttagcatcttaaggcattttctcttgtttagctgaattccttcatgctagtgtgaccctcttttgcttgtactctgcattctgtctgcctccttttccatctgagcctctgccatgcatttatttctctattagttagaatatggatagtataa

SEQ ID NO: 5768 - DNA, 1086 bp, Glycine max
  misc_feature (922)..(922): n is a, c, g, or t
ttaatgaaggcgttatcagatatgtacgagaacccgtctgcagccaacaaagtatacttgatgtgtcggttgttcaacctcaagatgggagaaggtaactctgtaactgatcatataaatgaatttaatactattcttgccaagttggagtcggtgatgaattaaatttgaggatgaggtgaaggcattgattctattgtcatcactaccggatagttgggctgcaactgttactgtagttagtagttctataagggaaaacacattaaagcttagtgacgtccgtgacttgatcttaagcgaagatgttcgcaagagagattcaggaaaatcttctagtcatgtttccaattcagcattgaatactgaaggcaaaggaaggactacccagaagggtcagaatggtcgaggcagatcaaagtcaagagggaaaggacagaaaaaatttctaagtgacattatctgctggaattgtgacaagagaggtcactttactaatcagtgcaaggcaccaaagaagaacaagactcataaaaataagaagtgtgatggtgatgaatccgcaaatgcagcaactgatgaatttgatgatgcattaatttgcagcttggatagtcctgttgattcatggattatggactcaaatgcatcgttccacactactccctctaaagatttattgtctaactatatttctagaaagtttgggaaagtttaccttgcagatggaaagtctcttgacattgttggaagaggtgatattgacatcaagacctccagtggatccctatggacattgcacgatatcagacatattcctaccttaaatagaaatttaatatctataggggcagttggatgatgaggggcattacaccacttttggagatggagcttggaaggtaacaaaaggcaatcttgntgtggctcgtggaaagaagcgagatttctttacatgattgcagataggatatggtagcagttactggaggctgtcaaatattgaaccctatggcatcaaagacttggacacatgagtggaaaagggatgaagcttatggcagccaagggtaagctatcaagctg

SEQ ID NO: 5769 - DNA, 843 bp, Glycine max
aacacagcaacactatgataaagaccagcaggacaagcatgcaggggaacgaattgcagcaacgtctgtagcatgaggatgatatattgcaattccttcagagataaatttgatagatagcataaagctcagctgttgagttattggtaaaaccgcaactgccatagaaacctgatatccggtgtcccaagctatcccgaatcacaccccaaacctggaaggcccaagattaccaagaactgtcatttgtattaaccttgacgaattggggtagtggtggaatccatctaaccaggatagacgtcggcatgcgatgaggttccatttgagccttctgcgttgaaaccaacaatgtcaggatctgattgtgaatgttccacggtggccagctgttgtcgttgaaaacactttcattttgagcacaccatattgaccaacacttgatgccaaagatgagatgattacttccttggatgtgtttacgtaaccataaggcaacatccatggtgtagaaagttggttctgaatctaggtgtaccatgtgccatgtactcttagcaaaaggacaatcacgtagagtatggattcacgtttttgtagctgctccacacctgaaacaagaagaatcaaatgaaatatgctgtgtaaagcggaagaagttagttagaaggcttcccttatatgttggccaaaggaagtgtttaatgttctcaagaagcttggttttccaaagccaggaccagtattctgcggaggtaaaatgaccagcgagctcacggtttaccacacataagcggacttggtatcatactccccaaaagaggaatgactccaagtgataga

SEQ ID NO: 5770 - DNA, 878 bp, Glycine max
ataccttcaaaaggtgttgtgtggcatctttgttgtatagcagaaactgatgctggcaaagatctgcaactggaatcccacttgtctgcaaacaaggacaaaacaagaatatccaatatctttaaatgatgtactagaaaaacccatctgggaaaaagacccttactttaatccttcacattatataaaccaatcattttagcccaccgtgaatttgctaaaacttcatttcaggtctatttggataaacttctcaacaagttaaaatcaacctatgcatttcaactttgataaaagctttatcatttgacttctccaaaagttgattttaacttttgcacaagttaattttaatttgttttaccttcttatcttctcctacaagtgcataatgagaccttagtcactgactttaaaaaatatcattcattgatcatcaatgttggtggaaagggagtgaaaaaggaataaaagtaaatggcattttccaaatccagggactaaacttaagtactgaaatgatggacaaatgtaatttcatcattttatggactaaattggatttacatttactcaataaacttgggagaagatttactttggacatccattcagtgacttctttaacaccacggtgcttggacagagcaacaacatatatttccattctgttgcaggtgctcagaacagctgcttcctcaatgtgattcagactacaaagctccgcaatggctcgaggccattctgcttctggtatggcaagcttttcacgcatttcacaggcgtactatgcacactcagtccaataaccatgacgctgctcctttcctttggataccctgttagaaataagtcaaagacattaaatgtcatgtact

SEQ ID NO: 5771 - DNA, 792 bp, Glycine max
  misc_feature (748)..(748): n is a, c, g, or t
  misc_feature (758)..(758): n is a, c, g, or t
aaagcatgatatcatctctcatacggtgcccatgatagactattgtaaattaagaagtcaagtacttacttgaaagaaaaaaaatacttatttttcgattctcaatttctcatccacgttgttcattaggtttgcttaatttcttgcttgaatgaagctttatagggtttgtgcctttgtgggtacttttctttttaatcatacttacaatcataatagagatatattcttatcttatacttcagttttttggaatcaatattctaacgtgtatttcattccgttattttgtttttcaaattttgaaaattttaaacatggattaatcttagtcattaaaagatcctaatccaggagtataaaaagtatattttttccttcgtttttataatttaagaaaatgacgccacacgtgcgacaaattcaaaaccccgctcagcctcgcgcgttaatatcaaacctcaataagcatcacataaaaaagaggcttcatttcgtcgtcgtttcaactctctctgtctacattctccatttgcaccaaattctctgcgcgattcggtaccatccatcatcgccgttttcaaattcttcaattttcaccatcaattccctttcgcctctctcaatcgatataatttttttgcagagtttgggatttcagggttttggacgatgaacgtgggcgacctaaacaaggtttgggaaatcagggctctgaagaggaaaccccgcggctgaagaaccacgnaaatgttggnaaagatcgccaaacaggtccaacccatcatgcgc

SEQ ID NO: 5772 - DNA, 876 bp, Glycine max
  misc_feature (209)..(210): n is a, c, g, or t
gtcgcgagagtcgacctgcagctgccccaagggttccagaagatgacaatgaatatgatgatggcctttcttttttggacgccatattgtgatattctttattcgatgagtttgcgtgcctcggttgttaccgttggttctttgttagaaaattgtgacaaataaggcttcacaaggcatgaaaatgaagccaatttggtcttagatannttctatttggtttttgaaatggatggcggcaactcggtcttgggttcacaatggaagaatctgttaggtgagaaagattgttgttactattagatgattaaatacctattacgtgaatatggatagatagatacttcaattttttcataatgctgtgtagtgtaaagtgacattatggttttaattagtaagagtaatttgttgttttagagattaaattttaaatgttcaccttaacttgttggttattatggcaatatttgacggtggagttggccattagttctagaagatgatgatggagggacataggaatcttgtcaattaaataaggttcaaatctataaagaaaaatttacatacacagcttcatgtatgcatccaaattggaaggtggtgatcatcatcttctaggaccgaattttcatggtttgtggtggctgtaggatttcttccaattaccttcaattctttaattatgcgggtaaatctaacagatactgtagaattaagcagaataatcactaagaaagaaactcaaagaagagctaggcaagttgcgggattcaccaatcatgacaggtgacaaaaggagcgcgcgaataggaaagctgagagatctcatgataatattgaaagagaaatgtagaacacacactcactttg

SEQ ID NO: 5773 - DNA, 834 bp, Glycine max
gactcggagattgccgccaagtcgactcgctggttggaggataactcgagaagcttctgcttcaacggaattagggtttgcgccgggtcggagaagatgaggcgcgggattggcaagaggccgtgctcgaagggctcgcgccttgggtgaaccacggtggttgggtccctcgccaatgaagatgacgtggatggctctgttggttccgtcatggcaacgccgagggaaaaatcatgagagagagagagagagagagagagagagttgcagatctttgattcgggaacaagtagagggagaagagagagatgcgggtgccttctggtggagttcactgtatggttgtatggctacgtggcgtattttgattggttgagtctgaacagtggcaaattggttaacttttcagaacggatttaaatgcatttgtactagtcggaggtagtatttctcatgcaattctgttgtggcacggaatttttcattgaggtacaactacaaacactgggactgagcactgctgctgctaaatttcgaatttttcacgtttctggtagtacttaattatgtattgctttcttttctatttttcctgcttggttgaatagtaaagagttactagtacaatgctgttcagttttctcacgaacacggaaactaaaattacttttagggaatcaattttttttatcattagttatgttaaatattactgtaaatctagctaaatccagcttggcttgtgcttgatcataccattttgatgactggacctggcaactgcttctgccaggaattttcagtaggtaatttaggattaaatgtatcatcaaa

SEQ ID NO: 5774 - DNA, 904 bp, Glycine max
  misc_feature (887)..(887): n is a, c, g, or t
  misc_feature (895)..(895): n is a, c, g, or t
tgatagtcagtaactaactctttgttcttagctcaattttcagttaacacttcaaagtttaatttctatgtagtgtgaatgcaaaagtttacataatcaatcaattaaaaatcatcaaaagtttaccatattggattgtgtcatactacatacatacatgtgacatgtgattgaatgattatgtaaaatttatgcattcagtacacactacacagattatttactcattttttttcttcacacatatttgtttttagtctttaaaaaacaaaatttgattcatgattcttgtcacgtccaaaccttttgtttttagagttttcgttatgaaaacgtaaaaaagcatttaaacaaaaccatttttctttttttgagacaactaaaccatgtttctattatgtggtttaacggtaggggtggttacgttttttccttttcccattgttgctccaaactatagtttaatctttttgctaattttaaaacgttggtttttgttttctttccttgacatgaggagttaaatacgatgatgagaattaaaattctagtctttttataatgtaaaaatatcaaatatagaaaagaatgttatgtcactaccggttctaacaatctaatgaacgctatctttgtttccatcctcgttatgggaatcaacatgtagtagtcactcttttttaactcatattctatactattttatttttaaaatatatcaaatatagaattgaactcactagttctttcccctttctttcttatgcttcgacataaagttattattggctttattttgatggataattaagaacttagatcatttcattctcaaataatatcaaaagaaaaaagactgtatctacttggcttcttttgctaatggngaacttgnactttgaaa

SEQ ID NO: 5775 - DNA, 717 bp, Glycine max
actccttccccctcggcacccacctccacgcccacgtcctcaagtcgggcttcctcgccgaccgcttcgtcgccaacagcctcctcagcctatactccaaactctccccacacttctcccaggcccgcgccctcttcgacgcgcttccattcaaagacgtcattgcatggacttcaatcatctccggccacgtccagaaagcccagcccaagaccgccgtacacctcttcctccaaatgctgggccaagccatcgagcccaacgccttcactctctcatccatcctcaaagcctgctctcagctcgaaaacttacaccttggtaaaaccctccacgccgtcgttttcatacgcggcttccactcgaataataatgttgtagcgtgtgcgttgatcgacatgtacgggaggtcgcgcgtggttgacgacgcgcggaaggtgtttgacgaattgcccgaaccggattacgtgtgctggacggcggttatctcgacgttggcgcgcaatgacaggtttagggaggctgtgcgggtgttttttgcaatgcatgacgggggtttggggttggaggttgacgggttcacgtttgggacgttgttgaatgcttgtgggaacttggggtggttgaggatggggaagggaggtgcatgggaagggttgtgacattggggatgaagggggaatgtgttgtggagagttagtttgttggatatgtttg

SEQ ID NO: 5776 - DNA, 886 bp, Glycine max
  misc_feature (779)..(779): n is a, c, g, or t
  misc_feature (858)..(858): n is a, c, g, or t
gactgttttttcaatttttaaaagaatgaaaacaactcattattattaatagatataatataacaatccgtcgttagcttcaacaatggttggcattgttaaaaatgtaattagatttgaataaaatacaaagaaacaattattgtcataccatgggcttaaactctggtatttattgtgtcaatagtatcttcaacgcaaaattaagaaaaagtcttcactttgggcggctctcgagaaagttcttgatcaacaacatatttcatgtgaagtgtttctgtgactgaaaacatagtgaacgtcattactacaatttacaaattaacatcatcaatttactaatcttttagcatccttgtctaatgtctcacgtttctggacagttttttttagtgtcttcaatcaattattatattgctaatttgatctttatttttcaaattatgtagctatatatctttttcatcttctatcacacgtctcatgaatttatatattagattaagtcaaaactttcttcatcaattaattatctaatcaataaaataaaatatttataaagcatcgttaaaattgcattctgtcaattaaattgagttttattttattttttaaaatgaaaattcgtaaatttatttctcttagctaaatgcatggttatttatgttaatttttggggtaattttgtagaaataaacaaaagaaacatttttgttgcatgagaatcatctacttaatcggtttgggaacagtcatttgatctaggaaataaaaaacanaaagaagacgggctcttgttaaatacaccttcctatttgctaatgatgaggtagcccccttttcttctattaaaattgntattaaccattatattctttttacccta

SEQ ID NO: 5777 - DNA, 831 bp, Glycine max
aagataagatggcctagaggactgtcatacacaaaccctagtaggctagtaccactctcaacctttccactaattactttaatttttttcagcttccttcaattgtctcctttttttattcccatctctgacccttggcgcaacggtacaattgttccttagtgatcggttgatcatgggttcaaatctggaaatagcctctttgcataggcaaggggaagggctgcgtacaatgaccctcccctatacctttgcgaagtgaggagcctctgacactggggtacattaggttttttttctctcccttccctctctccattcatccccaagtcttctcctcattcacacccaaatatttagtccctttactttagtctcatgccagagctttgtaattggttacttcctaatcttctcctccaactgcatctggcctataactaaacatcccagcatgcttagctcccattttcctactataaacttggttaaaaggcagctatttaagaaacattcagtagacaaatttattgtgtatgtcttatatagatacacgggcttggattattattattattattatttgaattaatgcatttccctattctccaaccaggttccacagcttgcatgttcattgatgccaatctgtgaagtttttgggtcatgtgtaccgaatatctcatggacactaacatcaggggaagaaatatctgccccatgctgtgttttcaaatgcatttattcttcttttaaagctatggagatttaaccggcctccacttgaatatggaattggagatgtacccacagttgggtctcaattaacta

SEQ ID NO: 5778 - DNA, 846 bp, Glycine max
aaagaaaaattaatatgtatgatttatatgaattaattcaccttatgcttaatttgcttcccttgcagtaaactatatataatacatcctctgccttttgctcttcaaaagattgtttttcatataatatgacataattgacagataacattactttttaagtatgtgatcagtcagactaggtttttcaagttcatgtatttgaaaaaacatatattgaaaaaagtcaagctcttaatgagattttgatattttaagatattagtcttttagattccaccgagatatcttgggtcacccaaaagaaatgttttctatttctctttttttagtcctcttttgaaatggatataattaataatatacttctaagtgtgatcacattcatgacaatcttgcatagttgcatgtacaatggaaacgaaagttcagtaagtgttgatccgattcaatgatcttttgtgctttttaatgtgcacgcttcttctactaaagtcctatatactatgcatcttttgctttggtgatccattttaggagcagcttctgtttctttcttctctaatcactgactgaatggtgtccttccttctttgcatgcgcggctatcaaagtgaaagttggtaccattaattagcatagaaggaatcaataaagccatattatattctaaaagctcatggcaaatagccgaatataaaagaaggaccacaacatcaattactttttttttgggtgaataagtaattaatagcaattactttatcgtatactatatatatactttttattttatgtgactctagttacgctaaaaaagtattgcattgtgagctataccttttg

SEQ ID NO: 5779 - DNA, 901 bp, Glycine max
ttctctaggatcgacctgcagagggggaatcttcgtcaggctctggcaaacaaagcaacgtttgcataaaaacagtgattacaaatttccaatggacccattgaagagctatgctactttgcgtattagatgcgttaagtgcgatgtcctttacgcagaattcacatgtaactataattgcagcaatgttccttgctgataacacttaattttactcgaacaacaaatgcacatcacaaggagattgtacagattaatatttattcaatgaacgcaaaaaaaaaaaaaaaaaaacacgagggacaagaaacattgaaacaagatttgaatcccaaagatatttctaacaaactaacatttaaaacctcttccacatgatgatcaatgcaaaagcaatttagttcaaaccaattgaaaagaaaggaaacagattttagaaagggaacaatgcagagataaataattataaattcggttgggttcataccataccaaaccatttccaattcattacacaccaaatattgtgaattccttacattcacacattctgttagattacattacatcattagtaccttaatcattacaaaaaccacatccaaactacacaacttataacccaagcaccaccccactgacaccaacactaaacaccacgacatcaccattggaggagagggaattcgggacacaagacacacgtgacactcttcatatttttggtttaattggtatttttataaagtgcttatctgatattaatgtcagatgacgggttatcaaggaataaacaagtcagcatctatctaagaatacatgaatgaggtaagcaaattcagttaagaaatgaatggaatactacaggagggaattgatttgcatatctacaaaaaattta

SEQ ID NO: 5780 - DNA, 843 bp, Glycine max
gaaaaacaaacgagtattagttcgatcattgggctacgatatgcgctaacttttacaagcaacaaccatcaaggcatcaaacaaaaaacgttaacaacaccaacccccttaaaccaaacccctctccaacacccaaaaataaataaagtacataattcaacataagcctcccaaagtcccaattaattttgattgagttgcaactacgcttcagtatattaaacttactttgaacagaatgacaataataaaggcaaagaatgtaaattagtacattacccctccagtcataggggttatgcaaaataaaagtaaagaaaagaaaagaaaaacaagtgcttttaaactcattaaaatcctcctcataatcaaccaaacatgtgctccattcaccttactaaagcaaagcaccagctgtctggcactaatggagtgatgattttgaatgaaaatgtttatcaaaaaccataaatcctagcaaattctcagaaatctttcttgaactggatgaaagcttggtgagatcaaaaactacattccgtgtaattatttgaagaagttacgaggtttgattttggattgaattgttgaaagaggcatcagtgtcatgctttcccctaactacaacactatatgagcctctcacttaaacagctcttttgtccttcctctcacagacccataagttggtctatccttattggggatatttggctttctttactaggcattaacacagcaacccaaacatgtgaaggccctcaaatgattcattccagaagcatgctctaagctgtccacatttgactgggaacatatttgaacaagacaaggatggacata

SEQ ID NO: 5781 - DNA, 900 bp, Glycine max
cgccagcttgcatgcctgcagcttcctgattatcttgacatcattaaacacccgatggattttggaactgtcaggaagaaattggatggggggctatatactgacttggaacattttgaggttggcgctgcaattttcagagcagctttctagaatatatttgatttgtttctcgatcgaagttgagcatgacttcgaaaaaaacattgaaacaaaagtagtataattttcggataatgttgcacagtgccgatttcatgattcttgctgagtaactatcgctactacattttttctgtcttgagtgtttatgaacaatcaatcggccaagtgcatgagcttatctctctcccgtttttgcttttttcatttatttgatattcatgatgaaacctggaatgtaactatagcataatgtttctgaattgtggctaatgtatgcatggcagttatatgaagcttggtagattagatactaggatttttggaactagtgctgttgtgagattaataaagtttcttgtgtgaaaccaacatacgacaacctgatcatttttaacatcgtttgtctcacgcaaattgtattatttgaggacagtcatttcttatatgtcatctgctcatttcaactagtcattcttgctgtgttcattgtgtggtctgaaatcactataaacccaagcgatggctgttacatggcatgttgcctgttttagattcactgatatgtcaaattttggtaaagtttatatattgtagcagatctgcactaattagtccaacacaccttttgtgtcagttttggctattgagtggagttttgggtttcatgtactactgtttgatcattgggtaaatatttcttggtagtccgatacaaatttgaacacactgttgctt

SEQ ID NO: 5782 - DNA, 869 bp, Glycine max
  misc_feature (816)..(816): n is a, c, g, or t
cagaatcgcatgctttgaggatatcccaggaaccttgttcttccccaccaggaagcttttgaaacagttttgagatactgcttgcctcataagccctgttaggccttcagccactaaatcaaagagaaaaggggccaaaggatctccttgtcgcagccctctttgaggtttaaactctgaagtagggcttccattaacaagaatagagatggaagctgaagagaggcaggcctttatccatctaatccatctctcatgaaaccccattctcttcatcatataaatgagaaattgccacgaaacagaatcataagccttctcaaagtctaccttaaagaccatacaagacttcttggatcttcgaacctcctcaatcacctcattagccaccaaaactccatgaagcaaatgtctgccttttataaatgctgtctgcctttcatctataagacaaggcatgacctttctcagccgatcagccagcactttagctagaattttatagatgcagcctatgagagatatagggctgaaatcattgatagcttggggatctttcagtttaggaatgagggcgataaaggaggaattgctgcctttggggaaggaggcattaacaaagaactcatcgagaaacctaagaaagtcaggtttgagctgttgccaaaactgcttgataaaagtgaaattaaacccatcaggcccaggggcttttatctttgccacagctccacacagctcgcgtaatttcctcttcagaaaaaggctcaaccattctgtccctttgagaagcattcacacactgaaattgaactncatctaaagctagtcgttgcagctggggttcatggaatctgttttgaagtgct

SEQ ID NO: 5783 - DNA, 799 bp, Glycine max
actatatgtccacaagaggataactgaacactcttcatttcctacttcaaacagctgagccattgtacctgcataataattaatatcattgaattttgacaataaggaatctatggctaatgaaagatcaagtgaatgtacttcaattaaaagcacacatggaaatatggaatgaactgtatcacttactaatattcatagctggtggcatcgcatactgcatcaccagcacatattgaaataaaggatcaacagggagtaagtcaaaatttgcggctgctcttacaataaacaatccaataataggtagtaacaaaagtcgagctatgatgatgctaatgagggtcaaaggtttgacacttgatgatttcaagcctgcaatttcatgacaaagtaagctaagcccatgaaattgatataaaataaaataaaataaaaagccgctaggatttttgataccttgagcgaggttaccaccaagcaaaagggtgatgcaaggaatggtcccattcctgcaaagcaatgaattcaatcagatcgataactgtggttggaaaagaaatgacactggagaacgaatttggtttcatgagcaaagatgcatacccaagtaattgaagagagtcttggatgacacgaagtggagcatcgtctcctattattatgttccttagccatgcaaccgcaccaaagaggaaaccaaaaaactgatcatggaatatgaaagtagatgaatgtcaaattgcattgatgtagtacaaactagagactgaaaaccaagaaacaaatctagcaaagc

SEQ ID NO: 5784 - DNA, 823 bp, Glycine max
acagttttgatcttccttccgattacttttcaaagcttcccggcgatcttcgattagacgtaagttccgtgcaatgctttgctgtgtccgttctcagcattatcatgcaatcgtttccattgttaatcaatagcaaattaaagatgcttccttgctctgaatcgtgtatgtttctcaattttgtgaagctaaacgacgcggcgttcgacctttcaaacggacctgttttagatgaggttggtacttactaattattactagctacaatttgcaatcacaattcagattcaaattaacattgagtattacaacttacaatgctaatggttgtcctggccttcttagttttttattatgttcatcacaatcaatatattggtggatgctattttgaagcatttcatttgagcttcacatgtatgtaacctagtgctaatccaatgattgtctcctaaagatttctctactatgtgtgtctgctgtattttccattctgaaatagtataatggatatatttgtttaatggaaatgaatatactttctcagtgtggccaagagttgggagagactttgctgaatctctctcgagcatgggaacttgctgacacatcaacctcccactctttagtgaaaaagctccctttgattgaggccaagctgacgggttatgccaaatcaggtaaatcgatgagaaagtaattgatgagtttttaatagaacacttcctccaaaaaaaaccctcccctaaaattataaaggattttagcttgaagagccctttgttcttttggtgcttagcacttggaaagcgtttggtatctg

SEQ ID NO: 5785 - DNA, 868 bp, Glycine max
  misc_feature (723)..(723): n is a, c, g, or t
  misc_feature (842)..(842): n is a, c, g, or t
  misc_feature (857)..(857): n is a, c, g, or t
atccactttctcccccttcctcctctacatctgctgactcggatgatgcacgagtggatgaaatgcgtatctctttacagccgagaatttgaaaagcatcctgatcacacaattaatgttataattagaagccttaaataagttttttgtcccaataaaatagttttgtttatttatttattagaatcgtagttttaaaaactgaaccagtaatcgactcgatcaagatattgggtcaatggtcgaaccaataggtcagttattaacctgcatgactcgatctttattaacaaaaataaaaaaaaaagtataccctatattaaataaaaaaaagaatcacttcacaaattagtacaacatttctgtggtgcagtttcagattgcattttttaagattaaattactcatttggtccctatagtttgaaagtggtctttttagtctttatagtttacattttaactctcttttagtccctatagtttcatgattcttacttttttagtcttttcaaattacaagaactaagagaattaaaatataaactataagaactaaaaagaacacttttaaactacagagactaaaagagaattaaaatgtaaattacagggactaaaaagaccattttcaaactatagggactaaaaaggtaataaccatgaaactataaggaccaaatgagtaatttaactttttttttaatttttcatgaagggaaanagtatctgtgtgcgcccaaaccgggtctgggttgttacccgctgtttgctagtctgaccataaacttgcccaggtcacaccgggtttccgatgcctgagccaaacggttgagttatggnatcccactcgacagncgttcgaactg

SEQ ID NO: 5786 - DNA, 805 bp, Glycine max
tcccaggttctcaatgttgcatgtgggggtaccctttaccaggacatagggaaagagctttcaaaaaaatgtgatcaaagccagagagtgatgcacatcaactatgatgattatgatggtcatagacatgctgttaaactggtcaaaaacacccctttgtgtcattggtttcagggtgaagaagaagaaaaagaagaaggggaagaaatggagattttggtgaatagctatcaccatcaaggggttaagaagttggctgaacgttttatccctatggcctttgcttctgatggtttgattgaagggttttatgatcctgaatgttataatcctcaagatggcaaatttatcatgggattgcaatttcaccctgagcgtatgagaaagcctgattccgatgaatttgattaccctggatgccccttcgcctataaggttgcttatagttgagagatttcatttatttcatgatattaattgagtactcattgagctaacatgcaatacattattattgttatgcaggaatttgtaaaggcagtgattgcttatcagaagaagctgaatagtttgacatctgtgccaaagcctctgaaacttaacaaggaaatggagagcaagaggaaaattatagtgcgtagcttctcacttgccaaaaacctatacaccatgggtcgcgggaattgctcctccaaagactctgaacttgaaattggagcagaatttttgggaggtactaaattccacatttttcatatttatttaattttgactatatataatatctcttcttggtttgttttct

SEQ ID NO: 5787 - DNA, 846 bp, Glycine max
  misc_feature (14)..(14): n is a, c, g, or t
cggtgttcctctanagtcgacctcgcaggtagcataattctctctaataacacacaactcatataatataccttcatcaaaatcatactagtcacagcaaacgtcacataaccatcaaaattctattataagttcatttttttttttttttgttaatttaacatcctcaaccatttcattcaagttcagttttttaaaaggagactatttagccacaatactttaagggattttagacctgttcttgattcaaaattaaaatttcatcttagtaccaacatttcatgtcaaccttaattgcacatgatactaaaatgaaattctaattttgattaaagaacaatactaaaaacactttaaggtaatgtgcctaaattttaaacactttaaaaggaagaaaaacccatatcttgatcttgtggaaaataggggtcattcttccaattctcataccatgcttcttcacccaacgaatcatcaagcctgcaagtctcatcttcaaaaatatgttggggtatttcgacacaagcatatccattaaaacgaaaatcatcctcatacgacattaacaagtcactgatgtcaaattcttggaggacacctgttaagcaatgattatagtcatctagttgcatggatgcagaagaagggttatgattgtcccagctcgttgtaatcaaattcgttgtgttgactgaatcattgactggcatcataaccttggtacacctcattgggtgagggggatttttgtaggatcaagaacattaccaaaggaattttttgagcaacccggagattcaattcttaatttgataggatgttatcgttatggctaggaatttt

SEQ ID NO: 5788 - DNA, 793 bp, Glycine max
tagaaaatcaaacaaatttgcaaacttgtaagttgtaacctttccagacaaaggaagacaataaatactaaactaactagaactagaaatcatgttacaatcctccaatattttaattgttacaaacaagcctggtaaattttgtttaattgtcacaattaaatctattttatcaaattttttaatctaaaatttccaacttctcatctttttttctttctaatttttatctaagatttccaatttctaacctattaccaatataaagttatctttattttgaatttcttaattttctttcttgatttagtcgttattttagcctctaatattactgttccagttcttataaaactaacgacttttgatataaatccttcttatattaaaataattgtattttaatcttcatcgtttaaaaatactaaacttgtttttaaattttttattaatcagtgataacagagacacgaaataaaataacataaaaattagagactaaactattttttaaaaagagaatctaaaataaaaatctaatattataaagcttaaaggccaataaattatttaaaccattaaatttcacacggtgaaaaaaaaaatccaaaactgaatcaaaccatgaaataaaattttaaaaaaaaacgtttttttgtcatgagttttatatattttcgatatgtacggatttgacttcgtattgaacattctttttgactttgcttaagaaagagttgagaataagacaatctgaccttgacttcgaaaggcttaacggcacaccatcgcg

SEQ ID NO: 5789 - DNA, 839 bp, Glycine max
atgggccttgattttgctgggaaggcagtatatactgctgtatgggttgctgctgtgtcattgttcatggagttgctaggtttctccacacagaagtgggtaactgctggtggtttgggcacagtattgctcactctagcaggtcgtgaggtacagcattgtttccttcatactggctactattatggtttgtatggctactagctttgtttcttgttcattgtttgttgtgaattcatcttcaaatcaacttaatcaaattctgtgaaagaattctaggtgtagccagtagccatattcaatcagtaatttggaattttgtatataaaaaataattatttaatactcttgtttggtgttgcgattctaagttcaagtttgtgattaattcagatatttacaaactttctttcgagcataatgatccatgcaactcggccatttattgtgaacgagtggattcaaacgaagattgaaggatatgaggtttctggcacagttgaggtttgtatctctaccttagttactttaatagtataagtttcatgctggtccactatatatataagtatttttatctccacaatcatgtgactaatagaagaatcattaccaatggcagattttctttttgtgcaacaacttcaattatgtatttaaattttgttttttctccagcatgtaggctggtggtcaccaaccatcatcagaggtgatgatcgcgaggcagttcatattcctaaccacaagtttactgtaaatgttgtgagaaatctgagccagaaatctcattggcgtatcaagagttacattgctatcagtcactttggatgttaaca

SEQ ID NO: 5790 - DNA, 836 bp, Glycine max
gaacccggggttcctctagatcgacctgcagaaccggggacaaagaaggtattagaaccagctgaattaataataataaagcatctaaaattcgggtgattagatttttggccaaattaacaacttattgacgcactaacccactatcacatacaagaaaatgttaaaggtgcatttacctgtatccccactcgttgtcgtaccaagaaacaagcttcacaaagttcttattcaatgcaattccagcctttgcatcaaaaatacttgatctggaacaatgatttttttaaacaaaaaatggttaacaggtaaatgaataataatgtcaggttgtcaacataaaaaggcaacaattgtgttaaaataaattttcagcttttaccataatttatacctgctatcgccgataaagtcagtggagaccacatcatcttcagtgtaaccaagaattcccttcaacttgccctctgattcctccctgagaaatacaacatcatataagacaaattgagaaggaccaatacaaaaatggagtaggcatttttgaataaaagtaatgaaattttgcataagatccaataatacacaatatcattagaggagaatcaaataattcagtcattacttgatagcatttttaatttcatcgtaggaagcttctttctccagcctcactgtgaggtcaacaacagagacatccacggtgggaacacggaatgccataccagtcaattttccattcaaagcagggaggactttcccaacagccttgcacaaaaaagtaggaatcagtaaaaccaaaaaaatgtgttgactataaacaattaaatttggga

SEQ ID NO: 5791 - DNA, 856 bp, Glycine max
agcttgcatgcctgcagggaatttaaaattatgagcacatttctttgcagaattaattcccttttcacagccaagacagaagttctgtaaagctgcccaaggtccaagattaggaatttccaatgtttacacacagattattagaaagaatgcccaagattcatccttcaaataatttaaaattgtatattaattaaaaatgttgaagtacgcaaattttgagagaaattgtatgttacacatgttctagtatttattgattgtttacattattcaaagagtaaactcgtctgactaaaaaacaatctctagcctaataatcagtaattgattattctaatctaatcaacataatgacaaaatattctaaaatgctaatagaaatgataatattctaataagtctctaggtaattctattacttcatccggagattaatagaagccaattgaagctacagataattataaaaatcaattttagaatgttggattttccaggtctacactattataccctcaatatacagacctcatggagatgaggtaacaaaatcaatttaacttttaaacttatattaataacaaaatatcatataattttaacatgataatacaacagcaccatatcttagctgacaagcaggttgtcaacatccaattaatgtattaggagaatcatcaaggtccaacatatgccactccccaaccacaagaaatgccactgaagagtctattcatagcattttgaacctgagttatagtttaaaacagtctacttacctcaggctttctgctcgctggccatacagtcccatattttttgcatatgactgagcaagtcctataaaatgacc

SEQ ID NO: 5792 - DNA, 865 bp, Glycine max
atttggttattctttatatgcataagcacccaatgcaattcttaggttgtgtttgtagattttaatcatatctactcttaccagttaccaggtgctccatctgcaaatgattttaatttctacctataactatatttaacaaatactaatttatcttaagtaataaaatagtattaaataattagggtataattgagtctatataaatataataatattttacagctcttttatatacaaaatagtaataataataattattatcattattaataataaatagtattattttttcttggtctttataaaaatatctaaaacaacaaatattacgagggagtaaaaatacgacaagaattgagcctttcaaccttatcattttttattgtataagtactatatttttctataaaatcttaataattctcttaatattttataaaataagtacaaaaataaaatatatattcaatatctataaacataaaaatatatttattattttccatttaacgaaaaagaaaaatattgtatgaaaatatagaaatattcttatatttttatcctccaaatattactatcaatatgaaatttgaactctgatcaaattatcaaccatcaacttcgtgaaaccattggatttatgcagttgatttggtgataaagaaagaagttaaagtcttaaaggaagaagacacagaggttgtgagttcatcttctgtctcttattaatattttaacaaaaattaataactaatattgatggattaaaaaaataagtcaattaaaccatacaaaaatgttaaaaatattctagatacaatatttagttgaaaaaatatgccgagttgtacttgcccatata

SEQ ID NO: 5793 - DNA, 864 bp, Glycine max
aaagaaaaccctcattgttaatagacatgcagatgaatcagttgcttgagttcccaaaatgagatggattcctcctcatgcctatgagattgactgaaacaaataccaaaacacaagctgtaattagaatcatcttcaagagtgtttgatgcttcagctaaaaagataatgaaatgaaagaaataagtagttgggaagaagtagttaagagggagcaatctccttggaacttaacaacgttgcatgttgaggtgctaattttgtgacaatttttcagaacatgggtggaaatcctcccacccgcatgattcactaagcactgaatgtttgcttataacatagcttcaaatacttgtcaggtacagacacacttcaaactaatgtaggtgcacatattcagtataatggagaacataatgctagtgaaaaataaatcatgcaaaacttgtttactgagagttgaatcggaaggtctcctcagatgcatacttagttctcatactgtaatggtcaaactttggatcattatgatcaacagcccttgtctcaactggtttagcctcagctccaactgcccccataacgacttctccactcttttctcgttgtctgtgtcttggcctttctttctggctcttagatttggtgtacggaggaatctcagaagaaccatagaattcagcatactcagggtcgtcttgacgacccggtgcttgcttgacatagagggtccttgaaactgcttgattttatctttgggggcttcatttctgaatatttctcagctatggttggagtatggacctgtgacgccatccgattttcggtaaaaggagtatggaccttggatgccatcctattttc

SEQ ID NO: 5794 - DNA, 1072 bp, Glycine max
attataaccccttcattcgctccaagagttccatatgcttccagcttttatcttagctctatcagttccattttctgacaactcctgcagtgctgcttctgcaccatgttctttcgctagttttaataatgttatacttttgccttccaaaaaaaacttatgactaatcctcttttcattaatccaattttgtatgttattgtataaaagatcatgggttctccacctgcctccactactcctcctcctcctcctcctccttctcctctttctcctcctcgtcctccttctacttcggacgcatcggcttcgacgtctgccatgaagcggacacgcaaagcctcacgcctacgatcgttgtccactagaccacctggtgttgagagaccagtggtgcatgttgatcctgctatagggaaggccgacggtccccacaagaagaaattaagaacatatttggggattgtggcacgtgataaggtggacatcacctacgagaactggaaggaggtccctactgctcaaaaggacctgatttgggaggatattcaggtatttctcttttcttatttgattttgtgtaattaatagccaaaaaatttcattattgtaacaaataaactttgtttcatgttgtcaggcggaatttgatatcccagaggcttctgacagtaggacgaaaaggaagttactatagaccgtgggggagagatggagacagtttaaatcagacctcacgaggaaatgggcccttgcagccgatcaggatggtgtcaaggacactgtctgtgacaaatacggcatcagcaaggaaaagtgggccttgttttgccagactcgcagagacccttcttgggaggtatgttcctttgccatttaagttgtttttcatattacacatgatgtcgttatacttcattctacccatttcaaacattattgtttaatttttccaggatgtgcgcatcaaggcacaggccatccagaagcagaatactgccccccacgttttgtctcgtgggggttatgattatttggagcagaagctccgagctgagaagaccaagaagaa

SEQ ID NO: 5795 - DNA, 874 bp, Glycine max
agcagacccagaagtttaatttttcttataaaattttcacatatataacaataagaaatttaatacatataattgaattttttttagtagaagaaaaacttcctttctctaattgtaggtaatttaaatccgtttactattgtggcaaatgtattgaacatgaaggaaaatttaaatattgttctagtcattgtagtttttttaattttttattttaatctttatactttattcgtttgtttcgaattcctataatttcaaaattaggtccgtggtgcaaaaaccaaaatccaaatgtatgcacgatgctaatttctagtgattttaaaaatcatccgatcaattttaattttatagaaaatcaaatttaaacttttaaggtataactactaactatttttttaatcaaatattgaaactaaatgcatttaaatcgtaataaaaaagaaaaactacacacatattgataaagaacttaatgtctatgcaatgtgtaaaactttttacagtcggtatataacttttttgtcatttataaaactttaaattttaggaaatagtagtttttttaaaagtttatcagaaagttaaaaaaaacttgtgaaataagttggatgagaaaatttaaataataataaaataattattaaaacaaaattgtaacagtagcatgacgagaggttattcttgccatcgaaattgtagacgaaaaaaatatcatttttcaaaaatataaaaataattaaattttaaaaaaaaagagaaaattaaatatattttatacagtaattgaaataataaattaaatgggataaaaattgaacagagcagaagagaaggagcacacatactagatagctcatcccctttgcat

SEQ ID NO: 5796 - DNA, 845 bp, Glycine max
acaaaacttaagcacctctgcaagatctggaagtgtttgaccaataacattaacagcctaaactttctcacaccccagtccccactatctttttatcactcatcaacctatgtacctaagaactaagatactagtaaaagactcatgcagattgatgtcattataatagtcaaccaaaaagctaaatttcaaaacagttcaactaccactgttttgatcaatgcatctccatcgacaaactcattacatcagggaagtgtagaatatgctccacctctaatacaaacactttctcattgtagtacaggagtttcaatacagagctaaatcttcaaacattttactgaataattttccaacaatattaaaatctgctaggaagctatagttcatgtaagaaactttgcagtaagaatcaggtacaatgaagacttttgtctcaaattctgagaattcttcacagtaggccttttctttagtaatttctttgatgatacctaattgcttttataaactgtccagcaaattatacatcagagtcttgcaacgatgatcatgattatctttgagattgatttgaacccagaaaattaggaatagggccaacaaggccaaaacccagctaaaaaaattccgcaggtgcatttggatgttgtagccattcgatacagtatattacgttgtacttagaaacaacaggaataattaaacaattcttatggttgcacccatgcacactatccttcaacagtgaaattggcctctaaatcagagcagagagcacacacaatcagcagaagtccccagtttaacactcatgcacatgaaaggaaaacacacattta

SEQ ID NO: 5797 - DNA, 879 bp, Glycine max
gttaatttcagaaataaattccatgtcagacttcagaaattttcaaatcgatgagaatgaaaattctgttactcagcagaatttttaatttatttatttataattctgttgctgaacagaatttgtaatttatttatttataattctgtcactgagctgaatttatactttatttattgatgattctgttactcagcagaattcataatttatttatttatttataatgctgttatttaaccgaatttataatttatttatttttgattctgctgttaatgataacttataatttatttgttcataatttattgatgattctgttaagcagaattataatttatttattgagaattctgttattcagcagaattaattatttatattattttaaaagggtttgaattactaccttatctttaatgatcaatagatttttggccattcttttataatttgaacatatgggtatcacctttgatgcattgtcattagtttctctttcatataatttattattatttttttcatctcatttattattttttcttcatatcatttatgtataaaattaaaattttataataatgaattaaaagttaatacttaaaattatactaaaatacataaatatatataaaaaaaactataaaatattaaaatcttaataattagtatttttaattaattataaaaatctattctttattcactctaggtaaatatctatcatgaaaaaaacttttggaatatagttttcagttattttaactttgggaaaatgaattttaattttttcaatttagcgaaatacataaaatagttctcattttacatttgacattacatctgattgttggtactatctatatgtaaaaa

SEQ ID NO: 5798 - DNA, 840 bp, Glycine max
gccagcttgcatgcctgcaggaatctttgtgtgtgtttgttttacttgaatcccactttcaagtgcgtgtttaactgaattgtacactaacaaaggattggctctcaactgaacgtaacgccttttcaaacctatcgccttgtatctgtttgaaagttgggtcttggagaaaaaggataataggaatttttttaaattcaaaaagtatattacgtttataaaaacaaacattaagttaggacattaaatttctatcaatcgatatttttttttattgttttaaaaggctatcgaattagagaatacttatttagaaacaacaattttaggggccatttagtttgagaaaatgtttgttgttttctcaggtttcattttttattatacaaatgccaccttgttttcactttgtttttggttttcataagtttgtatgagaaacagtaaaaaacaactttttattgttttcattttctgttctttactatttcctatacaaacttctgaaaatagaaaacaaattgccaacaaggtgaaatttttgtaattaaaaatgaaaatagaaaacgttttcttcaaccaaatagtcatactgttcttcctttacccatcagaactacactgtcaagcatcccttgattttgggcttggtcatatcctttgtgtgtgcgcatgcagagaatgtattctaccattatcatgttctgtttccttttactattgatagaaaaaaaattaaaagttcagtaagaatcatttaaatcttctcctttctttttctctccccacttgttttagacagaatcaaaggattgaagaaattactttttcatgatgctt

SEQ ID NO: 5799 - DNA, 820 bp, Glycine max
  misc_feature (797)..(797): n is a, c, g, or t
tttttgttttacttcttacaaaatgtgtttctttttgtttttcttccttaaagtattttagttaatattttttttcctatttaaaatatatttttacaattcaaagtgctatctaaagtattttaagaacgaaaaataaaacaaacacattttgcaatgactaaaacaaaaaaaataatttacaaggatgaaaatgaaaaaaacacaaaatatatttaagccaatgataatatatgttattttacgggttaatagtcaaatttgtcctctaaagtaatgcgatgacaaattgatccttgaaagattaaaaatataatttagttcctcattgtgcaacaagttagtcgttaaatttgtgaaaccatttaagttgtaatgtttaatgattaatttgataataagttgaatttttttatgaccaatttgatattaagttacaaagtttaaagaccaatttattattaaattgtccgcatgattaatttgtcatattttttatgcatgaagagactaaatttaaatttttatcttttgaagaattaatttattagtatttcatgctttcatgtacgaatttgactattgattttaattttattccatgataaaaaagaaagagatagagatagcacagtataaatgcaatgagtccatgtgaggaacaatctgctgttctgtaacaaattaaggtctttgtcatgtctttcattttcgtttttaggtccccagaaagcgtaggcgaaaagggaaaagtaaaagaagtgaagcagaaaagggaggccctaagaagaaagcanaaaaaaaaaagggaaatattaag

SEQ ID NO: 5800 - DNA, 840 bp, Glycine max
  misc_feature (817)..(817): n is a, c, g, or t
aaagagaatggactagactggcagacttcaagctatctcaaacactcaagaaacatggatgaacctcctctaaagtgagtttgtttccgaagtgagaaagtaaggatgtatccacccttgatttgatttaaagtgcatcataattttaaacccactaatttttaaaagcagatacaacattcagaaaacaaactccctttgtaggagctttttccaagaaacacaatgtataagtttgaactgccaattagttatttaaaaccaacatgtgtgcttacaaggaaatttaagacagaaacaagaaaaagggatgaccaaactataaaggccaagcaattgagggatttttctcccgggtttacactatttcccccaagccttttcccactagggcacatatacatgtcagctgttggcatcaaactaccgctctcatatcttggtctaaatgacctttttctttccataaatttctaaactatatagtttttggtctatcaagcaactcttttcctctttgagaaatgaatataagtgacgtatatttcctaagatatgcagcactacaccagaaaaattgtcttgcaagaatgcaaattgaacaaaaaagcaataatggatattgcaaaaagaaataaagcataagattctaaaacaaagaaaaatggctaaggctggacaagaattgaaaagagaaagaaagagaaaggtagaaagaatgatgtttgtatttgaagtgtagaataaaagaggaagaatccttttacagggggtgttcccttctccactgaaaatctaagtttctggtatttaccanaaagatacgtttctatttcaatt

SEQ ID NO: 5801 - DNA, 846 bp, Glycine max
acgccagacttgcatgcctgcagcggcaagagaggatcgaaaaagttggagtgaggtttttcatttttgtgttcactcgagaagcagaagcagaagcagaagtagaagcccgtgttgagttccattttccactgcacaaacaaagcacaacgcacaacgcacaacgcacacacgcgccatagtcatggttctgccagagtcgctgttctttagcgctccgtcactgtcactatcactgtaactgacatataaaaagcacttttcctctcttctcaaatcttccatttcatggctattctacctcctgcttcttcatttccctcgtcttctggtaagtatcttctttctctgctattctatttccgaattactgttactctttcaactaattcgttatttcatttctcaataaaacgaatgagttttaaaggagagtgctgacttatattatttattcatttgctcttacaataatagaactgtcgagttcggtggagcaaaataaataaattaaaagtgttttttgtaatgtattcggtcttcagattgtgaacaagtccaaaagttttagggctaaatgcagattttaggaatttgatcatgagaatgagtgcaaaattctgatcgagagtagatttttgttttcgattgatatagcttagatgattgttaattattttatacattttgagattttcttttgttttatgcgatttgagatacttacctacagtacacgtgttaagaattcaatcatgagaacgagtgcaaaattctgttggagactagatttttgttctaaactgattaaacttgggtgattgggtgatattttatacattttga

SEQ ID NO: 5802 - DNA, 830 bp, Glycine max
tttgggagtagttgatagggtttcagatttaagagaaatggatggttttcctccattgtcaccgtaggtttgagtttccccaacagcagaagtagaatgtttaaatggaatttcttctgtataagttctcattaatgggtcaggaggaacaacctgatacataggctcgctgctttctctatgccactgaaatacatggtcaatatagcagcacaatgatttttttttaaaaaaaataaacagtgaaagaaggcatcattatcattgaatagttctaccataaaaagagcaaaagacctaccctgtccataacaacaatagaacaaggcaagccacatgaaataacaaagcaagatagatggtgacggtgattggttttgcaaaagatttatcataacagtgaaaattaggattcaaaattataagaatgttgaaccgttaaataagtttcaccaggcaaaacagaaatcaattttaaaaaaaatagtatgttgtgaaaaaatttctagtcagtcaaattaaagtgtattcggagtttctttcatgacccatcattacacgacatgcaacatatctattaggaaatgtcatatttttactattattctcattttagacgagcaaaatccccgtataagaaccagtcaaatgtttaagtaaaccaatccatcagtcatatttcctggctaggactccaagacatcttgtaggaagttggagaatccactaatgaaaccctttcagcaataattcaactaaatttacccagtataacaactttttcacgaacgaactgttgaaactgttaatcatactacatactacatgga

SEQ ID NO: 5803 - DNA, 881 bp, Glycine max
  misc_feature (817)..(817): n is a, c, g, or t
attagacattttacaaaaacatcagtaacaatgcatgagaaaaatctgaaaaatgaaaatgaacatcctacacaaactgcattagttttcattttagttccaacacaataaatcatcaaagcaactactaaatgatgctgtcaagaacaatggcatggtctggtcaatgtgaaataagaaaaaataatataaaaaatagagaaagaattatacttcaaaactacaccattctcggtgacaagaaccatgatgtttagtgatgagataggattttctcctaaccttaaataaatctccttgtatttgaaattggtgagtattctttaaaggataactaacaaaatagaattttaaattgtaaaattaaatcaaaataaaattccatatggtgatatggcacatatatcataaatggatcatatacccaattggttttgccccatataactaaagaaatgcaactcattttggataaaattttcgatatatacatgttaatattgctttgcttcatttcttgtaattaatacttctactgctataagtgctagtgtgctacattgttgtaggcagataggaatgaacttaaacgtcaaaattcacatacaggttgtcaaacagagagactaattcatcaattccaaacgctacaaccaaaagtattattatgataatacttaatagttcaaatttccaaatacaacaacaatgttcaagtctacagatatcaaagaaaaaagtgctaacctgaatcatcctcaatagtatctccagtccaccacactcacgaacagcacctgctatggaaaactcaccntctggatcttgagactcctccctatcttcctccaactcttaacatagggtcaggtgcttcacat

SEQ ID NO: 5804 - DNA, 814 bp, Glycine max
agaactgaggagagccttcaaaataccaaagaccttgctgtggacatcactaagaaatccaatgggtcctctgaatccgaatcacgtatttcgaatgccatgtctcctcctcaaattgataaggaaacttcaacccatcctcagatcagtagtaacttggagcagaatgagtcacctcggtttaataagctggaccaggaatccgcctcacctcctcggtgtgatgtgcaagagcttaaaactacgttacctcctcaacttgataagccggattctactagtttggtttgctttgaggacaagctacctgaatcgaagttacaagccgcaaaaagaaactcttccagaaaatattctccaattcactatagggatgcttcagttgaagatgtagaatccctttgggattctgatgcggaggatactgccagcgtccttaattttgttggaagaatgaataaaaaggctaagcaaaaggcattcaacaaggacatggatgatattatggtatgcaccaacgcacatatagaactgctcaaagaatttagttttcaaaaaataattataattatatctataactagttaaaatagttataaaactataaccaattttattgttatggtagttatttcaaataatttatttttatttaaaaataagatatagttataaaactataactaattttatagaaattgtcattttaagtaacttattttttatttattcatggttggttatggaattgattttagatataatcttgttcataactaattatatttccatatttttaaaaataataactagt

SEQ ID NO: 5805 - DNA, 844 bp, Glycine max
agtattttgagttgctattcaagatggtagattcagaggaggctcttttatttttgactgttcgggggtgtctacggaccatttgtactctaattacccaagaagtgagtaatgttgagtcgttggagcggagtctacacattgatataacccaggggtttatccttcacaagctcatagagcttcttggtaaatttttggaggttccaaatatcagatcaaggtacaattgctacttgaataagtttacttgtggttgaaattttggtttacatgattttattaatttttttttgttttccagattcatgcgagatgacttactttctgaaattcttgaggcccttattgtaattcgtggcttgatagttcaaaagacaaagttgattagtgattgcaatcggctccttaaagatcttttagatagtctgctgctagaaagcggtgaaaacaagcgacaattcataagggcatgcatcaatggtctggaaatacacagagaggagagaaaggggcgtgcttgtttggtatggatggattttatttttcaatttcctaacttatttatcctctaaatcagttgcagtaattttctatccaacaaagtatcaatttggttacatgagaatatgattaacatgtaaatattgaatggtaaatttataatagactcttacattggctcattgtgaacttgatggaatctacacctacatttgcagtttatcttagagcaactctgcaatgtgatctgcccctcaaaccggagcctgtatatttgttggtcctgaacaaagcacatacccaggaagagttatcagggggatcaatgactaagaatcct

SEQ ID NO: 5806 - DNA, 909 bp, Glycine max
acacttttaaaaggttgaactttatttatttttatcttgttgaatttatgaaacttaagtcacttaaatatttaaacaccaaaaacattgatgaagaatcagaaccatgtcgtagcagtgaggtaaataaaacaggtttcaagatcaggtgctgtcttcttccataaagacgtggtctcttttccatctagcttgatataacgataggcatgtgtcacgtacggatacagtgaagtgaagttggacgatttggctacaatctctcattcatgcgcatccaacacttcacagtatgtaaattactatccattagtatcatttatcaatatctatttgtgttaataccccaggagttgatagtcaaatgcctgtctccagaaatacaagttgttagggttaaataagttgtttctctcaactactttcagatttgcatttgcctttttattactttctcttcaaaattttgttgatttttttagttctggtcaaatttcaaatgcctaattttagtcattctaacaatttttatcattttttaatcaattagtccttgtaagattgaatttttgctccgtttttgttcattttttatgtttccaaagcttaattttgcgcataaaaataaataaaaactaaaattaattgttttcttctctattgcttatgaaatatattcttttataattttgattttttaaattaaacaaataaaagttcctttttttctcttttcttttgtgacaaactagactactcaatccaacatggttgagaattatagtatatcgaaccaaaaggtattaattttattcaacttcaaaacaacaaaaaaactcagtgaaagtcttttcctttttttaaaaaaaaatcactattttttttagctaggcttaaatgactactacg

SEQ ID NO: 5807 - DNA, 840 bp, Glycine max
ttctttggggccgtccttaattgcacctcaagtgtggaggtttaatccaacatgaactagagatatgacttaatttgagtttataaagctttgggagaggaacatataagagagagaaaatagatccattattatgacaagagattttacaattagttactgaatctctgtttacaactgtatttatgcatacagagattctaactaactaactaacacagttaacctaaccataacagactaaccataggtagctttaaactaatagagttatactcttacaagcttggccagtcctcaccttatgagccaattttgtggttctccaaaaattgttatcttccttgaagcttaaaatgtcaatatcttcatttttaattttatattctatcaaacaatgcatttttatggagattttgtatcaattcatcctgtttttggttggggaaaaaatcttgcagagttcgcatgcactatggacacccagatgtatttgaccgaatatttcacataactcgaggaggcattagtaaggcatcacgtgttattaatattagtgaggatatatacgctggtaagaatgatatctgtaatatacgttcatttgagattacccttgatcttctagcttaattcatgtcacgtacttttaaatttgaagtgatattatgatatagtattacagaaacaactgaatatcttgagttatttaaattcattttataatctgtttgagaactagcctatgatgatgatgatgtctgtcttattattgatgaagactacttgttttcaaaatgaagctgtattttcatataatcaataatgcctttttgaaat

SEQ ID NO: 5808 - DNA, 863 bp, Glycine max
ggccaagcttgcatgcctgcagtgtttctattctactaatcctattctgtatagactgcaatttactttggcaagctacttcaaacaaaagggtgagtgacaaaacaaaaagaggagaaaaaagtctttggagaggtaacaccagcctccaataaagaccaaaacgaccatttttgagtgcttaagttttaaagcacttctttgaaacgttccacaagctttaacaggctgtggaatgcaatttaattcaataaataattagtactttaaatgatttattcttctctttatgcatgctaatgctagaactatgtttgtttccttatgtatttccctcaacgttcttaaaaccatcctcaataatagaccaaaaagctaacacaactaagcacagattgcacgtgaaataagaaaaataaacaaattgtcaagcattgatttccaccacctaatatccacacttcctcgttacaattttgtgcaagttatcaatcatatcagagtagcatgtcaattcctcccctatcaaacagcaaagtttaatgtctcacttaaaattttgctggattcacactcctcataagattacagttgggatttaccatcctcctttaattaaagttaccgttttactttatgatgcatcacccatatagctggatcctggtttccatactagcgggcctagtcaaaaccttaaatgagtccagaaaaatcaacttgatggaccacacactcatcaacttgttcttgtacacacaaaatgaagcatgtaaatagtgtttgtcacattatatcaaaccagttccaacagaaactgattaagtgctcaaaaaagatggtgcatttatctcattttttcg

SEQ ID NO: 5809 - DNA, 869 bp, Glycine max
ttgcatgcctgcaggataagatatatcagcttatcagattactcttttctgagagcaataaatagtgaataatttcgcccaaggcattaacgtcactttgaagtttgaaacacacagattgtaaatgaaataggtttatgtaatccaacactttagcagcatttcaacaaaattgaactaatatagtaatgatcctcgcatcccagaagatttctcagcatacaactagaaatcttttgttgtttcacttttttattctatacagaaatggtaaccactaaccgcaaggattttgattctaaatgaaccagtgctttacagaaagttagtattggactttagtgatgccatgttattcctattaaaatcttttatcataatgaagatttttagaatacttttggaatctctatccattatctcttgctaagtattttcaatacctccaattagaagaaaaagttagtctaaaaaactcacattcaactgcacagttttagaagcatagaaatctaaatcatgcataccacgttgttaatgagtggagagtcatcagcaaaccatgtatcttgtctctcagactggcaatgagcaaaacaagaatttatgaataacccagtttgagatgtctcagagaagcctttcacatcatttagcatttgatttctgaagtctgatgcaaaggagatattatattacaaacaaatcagatgattgtagatatacatcaattgctatgcacaattcacaatttcacatttgtagaaatcaaagtcaccttggaggaactgaatttgagatgagttacagtgtgcatgatttgctttacaatcattccaagagccatggggatctgctgaatgtgggac

SEQ ID NO: 5810 - DNA, 828 bp, Glycine max
gagcattttttagttgagttcactgacccatggaggaaccaaacccgtgtatattcaaccctgcaattttggattctctcactgatgatgcggtgcaagaaatcctcgacggctacaatggcttctgcaacgctacgcaatcacttctcgtcggtaacggcgatctctccgttgctcccgactttgtttctcttgttcacgttctctgcaaacaccgcctccgttccctcgttcaagaccacttttttcgactcctagaggtaccccacaatttatttccctaatagtgctgcaaagttcgaaaatttatggtgtttttcggtcgcaggagacgtttgaacgaaatggggcatcgagattttggcgccattttgatccttattctcgtgttgcaggtttgaacaagaatgatgaccttgatgtgagtgtttttcaaccttacatgacatttttttttcttttcctctttcgtcgtggtgattgtttagtgtggattgtgtgtgtgaacggttgaagcagattgatgaggatgagattcagagtgtgttgtataaagctttggaagatattactttggagaaacaatatcaggagaagtgtctattgatgttggtgcatgctttgcaatcttacaaggaccaggtgtcagaggataagcatggttttgaaggagacagaaattaccttacctctaagtatcaatggattgtctcttctgtactcatggcctcacttcctcggcatttccctggtttgttggctgtttattttttttactatgttaattaaatagggttttgccgtaaataaaatgattgctttgattat

SEQ ID NO: 5811 - DNA, 1318 bp, Glycine max
  misc_feature (247)..(247): n is a, c, g, or t
  misc_feature (1136)..(1136): n is a, c, g, or t
  misc_feature (1158)..(1158): n is a, c, g, or t
  misc_feature (1283)..(1284): n is a, c, g, or t
atgtggggtaaaaggagctgctgtaatacgagttggaggaggagctgctgatgtagaagctagatgaggagccattgatgtagaaggagtctcagctggacttgctcttggtcttctggtccccttaataataattgttggatcatcagggttccaacaattcttccttatgtaggccaaattaatgatcgggctcagacgttcaaagacaagactgtcgaaagcaactcctctggtcctgcataanagttgtgataagagcaggagttagactaggccatagaagtaatctgcccagaaatgagggctccaacattcatgtccagctgagtaactaggccaaagattaacctagctcgatccatagtcagatccgatgtgtgggaggtcggagccaagttggagtaggatagaacactccagacctgagcaaggatgattaggtcttttctgaggatcttccccgggtgaccttcagcatttagaataaaccctcggttgggtatgcacagtgcagcctcaatttctctagtgtcagtaggcatcctacagtatcttgagtaggcgggcaaagattcaccctcagcaagcaccataggtgtttctagaaaggcattgaggctgtctgcatcaatcctcttattaaatggccccggattctgacttgtttaggtgaaggcccctcaggactgtagaggttggtgtagaactcctttaccaacgcgaggtcaatcctactatcagctaagttggtgaggcgcttgtgaaagttacgcctccccagctcgcccttgaattcatccagctctttgtgatagatttccactttcctctcagctaatatgtgtcttcccaacacattgtcagtatatctggtctaggcctcaaaggaatggaatctccgtgtatcatattgagcagtgggccttgaaccgacgctctttcttttccttgaagacatctgtagacaaaggaattaaacatttgatgaggactcaatttattaaaaattaaaagagaaaaactgaaaaataacactaaaaaaaagacaatctccgcttagcgagatagttatcgcttagcggcattatgtaaaaggcacacccccgcttggagaaacatggatcgcttagtgngtttcacaaaaaacaacattgngcttagcgacacaggagtgccgtttagtggaaattgctacggcccagtgtttgcaaaattggcttagctggcgaggagccccgctagcctaaggtcagacgcatggatttgcactttgccaaggnntagctgcgcttagcgcactaaactgagcaaaatt

SEQ ID NO: 5812 - DNA, 825 bp, Glycine max
aaatgtggaagccattacttccaagttccagtgataggtttgagatctgggaggattatatgacttggattattggattttgttttcctgggacttaaaggctacttttagtcattgtttcactgtttttttatttttgaaacaacaaatctcttccattgatgtttttaaatactttgtcattttgcaatcctcattatttatgcttgcatgatgggatttaaaaaacaggttaccaaaaacaaaacacgtgattatgtccagtcaattttttcttatggttagtcaatgaattataattgttacatcattagttaatggtattatttgagtgagctagaccccttgctagtttccttttatttataaccctttattttctcttcacatcccacttattttaaattttcttttgctttcttgatatttttaagaaccaacttggtctagtttgattatccattgagtgaggccgaatgacaaaaaatgctcccataatgaattcagccagcccacttttgccacttgatccgttgggtcgaactaaacgactcactttaacacctcaaagtctaattaggttaatttttttaattgtgacttacatttaacctcttcgtttgtgatgctatataaattctgataccatattgacaattagagagtgggtccaatgtccaatctcagtcttctagataggattgtgagttggtatttttagtttttgcttgagagttgcacctctgttaaaaaaaatctagagctcatggactagtgcactccaaatatatgtaagcgtactttctttaatgatgtggactacct

SEQ ID NO: 5813 - DNA, 856 bp, Glycine max
aatttgcattcatgccacagtgagatgtacttctatatgcacaacaaacctgtatccagcttttgatagattgtaaaacagaactccgaaaatcatcaccagctacatcatgtacttttgcctgtcattcagatgagagaaaaacaaatgtcatccaaagattagattcacaaagagacacataaatgcaacaaaattgtgagagcaaaattggcaaaaaagagattgaggaaaacaggaaaagccaggattttgaatttaacaaacatgctcaccttcagtagtaaaaatatagcagaagcataagcatcttcagccatggaagtaaatccaagattcctaagatcaagaacaacttttccaatgttcttcacaagtttacagttttccgagaacctatggtcattatagcactcatcaacatccatttcaccaactttgttgcatagttttcctttttcatctaaatccatgcaatccttattttgagatgcatcatcaccaaactctccatccataatggtactcaactcctccagttttcttttaaaataccaatgcagtataactaatagcagcagcaaacaggaaaaaacatacaaggccaaaaagaaaggatgtagtaagctcctcaagaaaagaacatcaaataagagaaattaatgccagcaggaaagacaataactgtattcataataagactttcaagcaactataattttttacaaaggtcaaaagagggagatttggctcctctaaaaagagcatcccacttctgagggtaaataacaaatctcaattgttggatggggtcaaagctacgcgcacatgcttaacaatcatggatatgatggac

SEQ ID NO: 5814 - DNA, 790 bp, Glycine max
taattctagttttcttgaatggtcaactcacaaaataggactttgttaagagatatacttaagtaaatcgctcaaaaggtgaaatcttctaagagtaaagagccaacatgacattacatgatagttagacatatatattgataattgtgacctgagaatgatgtgttacgtgaggagttgtattaatacatggttgttggaaaaatgaaagatttttatatctctttttaaatcttgatcttatatttattttatatgttattttcttttaagatgaacttatccttacattttttgttgaactttgatgattgtgtcatttaatagggagtatattatgatgtagcctttgaggaacgcatgtcacttatggttaatgtgatcttaatagtggatttaggggggagatctgactcttcatcatttatttatgttttgtattagtagaaatcaatttaagatttatgtatcttcataaatctatattgtatttatttcttgaatgagacacttgaattttatttagagatttgtttatgatatttaatgaaatagtatcttagaacacatatctttatattttataacttaaagaaccttttatgaataaagtttatatgacatgcttgcattcatagaaaaaatgatgcatattttcattaattaaactaattcaagaattttaaaggatattagaaatatattttttccgcattattaaaatcttagtatttcatatactgatatttgggtttcattatactttttgataagacattggcatttaatt

SEQ ID NO: 5815 - DNA, 880 bp, Glycine max
ctctagagtcgacctgcagtctaaaaagaatagcttctaaaaagattgtggacaataccaataggtgactctttactattgtttgaaagatcgcatgaacagtgtgacccaaaaattacacattttctgataatttatctgattataattttcttttatacttaagagtaactaaatacatttcatctatgaacgaggtgctttgggtgcatgtggggcagttattgttcgtttatgtcacgatttaaactaaaaatcctaatcatggttcccgggtagtaaacgtggcctaaagatgtcttcaccatcctctaatttgattaaggtatcagttggtaagatatgatttgattatttcattaacaatctctttgcatcttaaatcctggaatgaacttttcaaaagctaaagaaagcccggaccgaaaaagcaaaagctgtaggcaagaccgtgatcccacattacattatttctaatctttattcatacaaaagaccttaaatcactatcacagccccctccaatttgattcaatccccttccctcctttcaactcactttttcttttcaatttagctttttcatgatgccaaccactgttgacacccttgttccatcatttctgccctttcactttaaaattttcaatagaagaatcccaagtcacccacgattccttatgatgtgttttctttttctacataatagatgtatatataaaaactcttattagcgagagtattatgtatataatcctgaaattggataccaagtttaataattgaatgttagggaaccgagtactataacatgcaccaattatttaaattaaaacttcatgaatttgtagagcctaactgaaactcattaagcaatgaa

SEQ ID NO: 5816 - DNA, 813 bp, Glycine max
gtcatactaatattctagttatggcatggatggtgtttccttttagactcagctcaaattgatctaattatatcaagaaagtctaattcagttgattggataagatgtgtgagttattataagctgttatctgtttttaattcttataaattaaaaaaataatctaattatctcatgaccgcatgcaattaaaaaatggaaaaatacaaaaagaaagtatgtgttaactgtcattaattgtataataacaaatggaaagtcataacagttaatgattattttgaaatttatgcacagattgagaatgactccaatgaaatcctgcgcaagaaagtagaagataagaaccgtgagctgaggtatacatgcactgcacaaagctagcactttcatatgttgcataataaaaaatactactatatcactaagacgtggtttttccacatttaacacaggcagatgaatggggaagatctgcaaggattgacattacaagaactgcataaactagaggaacaccttaaaagaggtttgatcaatgtttcaaaagtaaaggtttgtgccctatgaccaatgatgctcacagttcagtagtttatttccttttgccatttttttagagggcaaaatgaagatatatattactattgtgtagtagttcatttctcacaagggattaaatctagaactagaacctatgcatgcaatgttgcaaccttctccttttgatcagttatgattgtggggaaagaatacttatatgcttctgatcgacatactattatgtgttttaggatgaaaaacttatgcaag

SEQ ID NO: 5817 - DNA, 821 bp, Glycine max
atcgttttccgcttctggcttgcgtgatcgtgatctgctcttcaaggttcgtttctgtcggtcaagtatttcatgaatctgaacctcttgcatcctattcctatcctagttttttttatagataaacttgtttcagttccgtttggttctgaattcgaatagaacttgtctactacttgatcgtttttgtttttgcttttggttaattagctgattagtgattaatctctgttttgtaccagctcaattattgcttatattggtttattctatttggcaaattatcagaatgcacatttaggaagaaaaaaaatattagggaaatttatgatcgtttcaatcagagctagttgtattttacttctagaattcgggagcatgtatgtagcttggggtcatgaattcatgaactgcaatttccgataagaagtttttcacctatcactgcaaagtgaaaatacatgaagaaaagaaaatacactaatcctggccaagtgcaaacagagtttcttaagtaaaagaagaaaccataacaatttatttcctaattgttatttaatatacagacaaatgatttatttcataaaataatatgtcttaatgcaaaaaaagtgaaacagataatgtagaacttctcaaaatctaatagcttagctgccatgatgttttagactatgctagatccttacattgacataagagatcaaggcatatcggaaatagacctcattaagttgagcaaataaaccacatggaccaattgggcagttatatctacatcatgaatttttttttttgctatttatggcaagattctcttg

SEQ ID NO: 5818 - DNA, 841 bp, Glycine max
tcctgttttagaagcatttggaaatgcaaagactgttaggaacaacaattcaaggtattgaatttattgttcagtaaggtcatcttttctccatctttgcaatttccaccgcacccttccttatcttatttggtttaaagtctgtcctaagcttacatagtataatttcagtcgttttggtaagtttgtggagattcagtttgatcaaaaggggagaatttcaggagctgctatcagaacatatttgctcgaacgatctcgtgtctgtcaagtttctgatcctgagagaaattatcattgcttttatatgctttgtgctgcaccacaagaggtacattacttccattttggataactaatttaggcctatatagttaagatttgcttccatggtatgcgaatttgttttaagattaagatctgcttccaagaaagtaatgattttttctctttcaattaatacaagttagttcatgaataagattattgtttgtcaagaaattaaagattggctgacatactctactattttctgagaagtaacatttgataacctcccaaatcaatactaacatgatacaattggtgcacctcttactgctcattcatagaaaaacatattcatcaatgaaagaaacaaaccatttgtggcggaaaaatattagaaaaggatacttggccccaaacatcaaggtggaccagaggaaaaaggttcatcactttaattaaaactagaaagacactcttgccaatttttgcatcaggcttatatctttgagtttggttagtgggttgattggacttagtctcggtagcagacatttacagcaaaaggttgatg

SEQ ID NO: 5819 - DNA, 808 bp, Glycine max
atatatgcatgctttcttggaatatcagcaaatctccgttatcaggtatgtagagaacttgtctgttgcataaagttttctttgtaactaatatgtaacaatagacattatggaagattgaacctagtttctgtaggaaatgaaggcttctatattgtcaggttgatggtttatgtttcaatactcaatagttgattatgtgatgtcttgaattttttcctatatatattaaaaccggacagagaaatacaatttggaaattcatgtagacattttgaaagcaggacttgaccagctgtgtcttgaataactagttgtatactatgtttttcttaccacttaggcagtgcttgaagtagatggtgggtagcaagcataatagaaaagattggacagtaatgtggtatgcttttggatcctctacaatctattttgttcaaataaagggagtagaggggaggaacacctggtgtggttcacagggaaataaaagagaaaatatatatatatatatatatatatatatatatatatatatatatattattttttttttattatatcctcataataggataaatcattaaggatagtttagtctaattagtgtaaaactttctcctctcccaaattctcctctccaaattgataggggggattttactcccctcctttctccctttccttccaaatctttgccctccttcccctccattattttccaaccaaatattatgttaataaaccctggatgccattaaaagtaatagtgaaaaaaatactcagttcaataatatctattatatct

SEQ ID NO: 5820 - DNA, 896 bp, Glycine max
ccgctaggatcgacctgcagcaatattaccaacaagatcttaaattgcctactttaataaaatacaagagatgatggtttaacatcttactcataatattaatagtgagactcttgtaaccgacttagcttttagctctgtgttctaccaagcaccgaagaaattttatgttcccagtttattcatatctgcttttttcaataataaattagcatctaatagactagaagcacattaaacaattaagtaaaactcgcaaaaacataactcaataataacctacgaatgactggaaagtaatataatcaatgaatcacagtggatacataaaagaaacagtaaaaatagatctatagcatgaaactccctattcaatttaaataacaaaatttaacaaaacacatggatggaaatgttactctcatggccagtcccaaatgataaatgtgcaagccaatggaatatgagactgctctggcagagatgtcaccattcaccaatgagggtggtgccatcaacaccagtgagcattgatttatagcagttactatatacaatttgtttgctctccaaaaagcatgagactccttctaagaaatctcttgtcaatagaatttaattaaaatgtaattataatgcaaaaaattttaccctatctccaatcacaaatttcatctagaggactgtaataatttccatttgttaatatcaaaaccctcctcctttgtccggacttgggaccggctatgagaacataggcggagttaaaaactttttttacaagggtttgtctaactgatcccaagtaaaaatcgggttaaaccaccccatttctaatggaccaataaatttagatatttttttatattttgaattctatcattaatggtatgact

SEQ ID NO: 5821 - DNA, 840 bp, Glycine max
caatattaccaacaagatcataaattgcctactttaataaatacaagagatggtggtttaacatcttactcataatattaatagtaagactcttgtaactgagcttttagcactgtgttctacgaagtaccaaagaaattttatgttcccatttcattcatatgtgcatttttcaataataaattagcatctaatagactagaagcacattaaacaactaagtaaaactagcaaaaacataactcaatagtaacctatgaatgattggaaagaaatataatcaatgaatcacagtggatacataaaagaaatagtaaaaatagctctatagcatgaaactccctcttcaatttaaataacaaagtttaacaaaacacatggatgagaatgttagtcgaatggccagcagtcccaactggtaaaagcggcaacgccactccacaagccaatggagtatgagacaccaccaagggtggtgtcatcaacacgggtgagcatttaattaaaatgtaattataatttatttgttctccaaaaagcatgagaattcttaccagaaatctcctaccaatagaatttaattaaaatgtaattataaagcaaaagtttttaccctacctccaatcacaaattatatctaaaagattataataattttcatttgttaatatcaaaatattcctcctttgtccgggcttggggaccggctatcagaatataggggttggagttaaaaatttatttttttacaagggtttatctaactaatctcaagtcaaaattggggtttaaaccacccatctttaatgactaatagaattttaagaattattttaaatt

SEQ ID NO: 5822 - DNA, 824 bp, Glycine max
attctaaaatgttcaaacttgcacttaaagaatgcaagcatgtgttagagggattaggttctcttgttgatgggtgaggtggggcaggtggtgtcaccaggatcatccatgaagtcttccctcacttgaaatgcactgttttttaccaaccgtaggttgtggctaacatgaaaggaaccccaaatttgaactttgttggtggtgataggttcaactccatctcttctgctgatgcagttttactcaaggtatgtctatataaattaatgttcatccaacattaagtttattttaattttctctcatttaaagtctgaagcttaatagtacatcccaattcctctggcactacaagaaaaaaaaaactaatcacctactgccaaaatcggtcggtaaatatgaattttccatatttttcttgtagtatatatagtacttatcataaggtccaattaagtaagttatcaatattaagaaattttattaatttaagttgaaacatgaaatttgcattaatttactactttaatgaatagcacttttatgaagaaatcatagcttaaatatgtttttaattttttaaatatgtcattttctgttaaatttttcaaatctaaacttatttttttagtcattcaaattcgtaaaatatttttttagtcctcatgtaaagtgtgaattaaataaaaaaataaaatattcacaatttttgatatttttatcgcataatttgatgttctacttatattttaaagtatatttttttgatagtttggaattgtataaattcagttaataaaaaatgaaaagtatttttaaagcag

SEQ ID NO: 5823 - DNA, 870 bp, Glycine max
ccggtaccatctctagagtcgacctgcagaagatgacaacactcattctctaataaatagggatagctttcgacattacaacatgggtggtattgcagaggtgattttcagtttgaacataggagaggagaacatatttaatatcatggtctttgacgagagagcttaaaataaagtactatattttattgtatgtaggtgttattggcacttgagaggattgaacaagatgcagagctaacccatgaggtaattcttgactaaaagttaactcaacctagctggccagttatatgacaactttcatcttgtatctttgcagcaaattcttttgttggaggccaacttgttcctcagtggattaaacttttatgatcaccacagagacatgcggttggatattgataacatgtcctatgaggtattttaatgtcaatatgtcagaaggctccacaaatcagtttcttatttccttttctttcatcaaatttagaatgttttgtgctttgtgggggctgtatgatacaacagttttggataaaaatattctttagaacgcatacttctaaaagtaatattgggggattagaatgctactctaattgatgtttataggtagtatgttaattgtaactgtgtagagggaggtggctttgggaagggactactatcctaaatgatgtagcatgggttggtattaaaaggcttttaagttttttttttttcttatcttagcttccaaagttttctgattgacgacaggaacttttagctctagaaagagagaatggggaactgtgagcaccgctctgcccggaggaagcacttgcagaatgtctgaaaagagtaaatatcagtctgcacctttag

SEQ ID NO: 5824 - DNA, 844 bp, Glycine max
aaaattattaggttgttaaaaaagaagaaagaaggaagtccgtagaaaaaaaaatcaataatcttattcaccaagaaaaaatgaggatgaaatatgaatttaggtataaagcatttacttttaattggattaattatgtttttaattcctaaattttttaagaattttatttttagttcttaaataaatttctgtaacagagactaaaaagtaaaaaagttaaaaaaaactatttaaagataaaggtgaaatttataaatagaaaacataattaacccacttttaattaatcactatcactgccatcttacatttattctcaaatgtactaattgaaccaacctgaattagaagtgagtgagtgcggaaatcaaatgtgtctgtgtccttcgaagttccaagtatcagtcttacttacgacgggctaagaagccaaacccaaatattttctttggggcatcacccgagtttataaaaccaaccagcttcgcaacaagtgctgcactttcccttacgtggttcaagtcttctgtattcgtccataagcgccacgccaactgcacacttctgtgctttgacctcaaatcaataccccacttcacgtaaagttcctctctttccttcctcgtaaacttcttatgcacttgcttgcttagcattttcctctcacgattcagtgacatcaagctgttcaatgaaaaaagtgtgaatactggatatgacaataattagattagacactatttggattagtattttacgtgccttgaattaggtgtgacatccgaaccatgtcctgcaatgtttgttgtgctaaaaaaccgtgtcttaaggaaggacaaac

SEQ ID NO: 5825 - DNA, 853 bp, Glycine max
tgcagagagagactcgcctaattgacaaagggaaaaaggagtgtattctcggggtaattttggataagaaaaatgaaaggagagtgcattagtaaataaggggagtgaaaataacaatagcctaatgccatatcaccatatcccatgcaaaaacccattttgggttcgtaatgcacattgtgaattatttcattttttaaaaagttgtaaaaattatataaaattaaggtttaatcaatattttggtcatgtaaaatacatgcctttttcttttaaatggtctatataaagtgttgatgtcaggatcctaagatggaaaaaatgatgcagattcagctcttaatgttatcaacactgtatgtaactattaggaaattcatttttatcatgaagcaataaatactacattgatttgattcttaactataaacttattgaattcgtaacacacaatgattaaaacaactaataaattaaggataaactttaacaagagatttgaagtcaaacacaggcgtaatcttgtagatactgaagccaccgtcgtatataatattctctcattctttccttttctctctcttttccattgaacatagtaagcatcaccaactcaaagtccaacttcaactcggttattttgcgaccatcacctgcttcatcaattgctatgtctatgattatcgcctttcctcttttccctttgctagaaatggcttctttgtagttattcaatatcttcagggagagttcctcattccaatcatgcaaaatccactgcaaaataaattaaagctataattaatattactctttccctgttcttattataaatataggatagtataattaa

SEQ ID NO: 5826 - DNA, 896 bp, Glycine max
tggtttatcaagaaaaagtgaaaggagagagtaataatagaaaatttccgaacaattttttatcaggaaattaaattccgaacaattaattatattgttgtttaatctatttgaaaatatttaaattttttaacaaaaatatgccaaaaaaatttattgaacaaatattcaaatcaataaaactaataagtatatcttgtattatatcagcatttttaaatttagataaaactaaaaataattaagaatttttataattataacataaatatataattagttttaatcaattttaaacatatatgcattcttttaatatatatttttaaaaataaacaagaagttaagaataacattgggtcattttttaaaaagagaacaaactaatatgcagtatatttcttattcaagatcccaacacctagtcaagctactaccacctaattctcttatttctccggtgacataggcatcattacgcagtatatttaatttaaatttattatatgatatttaaattaaacgaattaatatataacacgatatgtaatcattatgttattcataaattttagtaaaaaaatgttattcataaattattattatttttatttctatttgagtcatatttccagtgattgaataaacttcatacgtaatatatagctgatttaatttttatataatgttaagcataatttttaaaaattatgtaattatattatttagtaaaattaatatatttcattattattattattataataaacaaacctaacatatactttcttaagataattaagtaataatttcaaaacaattataagttaacaaattcttttatccgtcaaagtaccaaaaaattatacactcattacattattaaaatattgagc

SEQ ID NO: 5827 - DNA, 852 bp, Glycine max
aaatactaggtggatttcatttaacaaattccattagagctactgagctggtaaaatgttagtggttagggaaaatatgttgtctgttgcttgtctatggaatatccaatttctgttattcaatgtttccattttgttttcgttttcgttttcgttttggcaaacaacttgtgtgatgcttatatatagaaacttatcatgtaacgaaggacagcagagaaataatacaatccttttcctcatcttcttcctctaggaggcccctagccctcaaaatctaagtatctgtgcttgtgtgtgtgtgattaaatcttaattaaccctccatataatatcatgtcattatttaatatttttaatctcatataagatgatgttatatatatatatatatatttatatatattcctttctcgaggagaatactaataattactatttcttaactttttttttataaaaaacattatgaatactccagtgcaatttttaatgcattttagcataatttttaataataaattatttattaatttcttaacttttacccttaaactactagttaagaaaactccttttctttatgtatgtatagtcatgacaaaaaaaattacttaatttaattttaaatcatccatttaaattgtatcattgagaattactccttgcatcatatacactcttctaatcaaatgctaagaacccttaattccttcatctttacctaggatcaatgttgatcttgattttctctcgagatcctacatggtgtgatgcggcacatggtgatacgagaaatatgatacttaaacacttttataaagaattacctcttagaatgatttttttttt

SEQ ID NO: 5828 - DNA, 832 bp, Glycine max
ttcttgaggctagatgcattcctaccgaagatacttatgcccttcttataaaggcctactgcatatctgggctgctagaaaaagctgaagcagtctttgccgaaatgcgaaattatggccttccctcaagtatgtttctgaattaacttgttcgtccacacatgctgaaaaagaaatataatcaaagattgtggatttgacatgataaggttgatattgaaatggggcttgttattctcaaaatgttaaaaaatttccaactctgattttgaggacctggacaatgcaggtaatcttagtatttaaaactcaaaggacactgccaaattacactagtaatttatttcattattaatttatatacaacaaaagccatttcattgctctttcccctgactcctcaaggttcatggctaagttaaacatgctaactagatatgttgcagaagttctattatgtgttggtcacttgtacaatatcagaaatagttattttcatgttggtgggagactaatttcgataaggttgctggcagccttggatagtgaaaaggttattgtgccaacttttctgtgcaatgacttggtgaatatccaattttagatttcaaacattaaagtagaaatatttgaattaaagtagagagaaagaggtatgggacccacacataatttaaaaattttctctccctttctctcatatttatctacaaccaaacacacactaagagatgagatgttggaggaaagtgataagttcactgggtctgtatgtatcatgcctttcagcaccttttggtttttcttctgcatttagtggggttattccaaa

SEQ ID NO: 5829 - DNA, 849 bp, Glycine max
aacaaaatgcgtagaggttccaaactggggtaggatgatctatcaatgttgttcatgagttagtgtgaagagccacgtataaataaataaaaacatacccaaaaatcaaaatgatcattttgatatctgattgtctaatcaagtgataatttagttattgaaaagacaaattttgaattcctaaatgttcaaaaagtggattaattaagtcctattgatctacaatttaatgttaaattaacccttaaaaaatacaatttcatgttaaattaattataaaaatactattgaagatatacttttgtaactgcataatattttatttttcagattttaaaataggatttagtaaataaattggtttcctatattttatgatattttatgagtaagtcaattttaatggattaggctagtcaataagtggttcttatctttaaggagcaagttagttttaatattctattttactaataagaacaatttaaattagaatagaataattctattttctccgcataggtattgtctctcttctttcctctgtttctttataattttctccacaagactaacaaatacaacttaatgtcaaatttgcatttgaacattacatcttaataaaaaaaaaatggttgtgaaacttaacaacagtccgtaattttcatactttttacgaatttaaagattacatcaaaatttgagttctttcaagaccaaataccctatttgcgcatttaggaatgtcatttatccgctttggtactttttttgttatctctgataagatatcatctcaggcatagacgtaagactaattatcggtggatatcatcatttatttactta

SEQ ID NO: 5830 - DNA, 866 bp, Glycine max
cttgcactgcctgcagttacactatgccttttaaaatgagaataaatataaatattacagttgtaggtatatgaggaggatggaaacacgttgaggactaaaggtttaattgaggagctaagtattaacatgtatttatggaagaataaatattttaaattaatttttggagaaacaactctgaacataagcatacataattatattataaacctgattgacatgtctgtaatccttgtaacattttgttgggcaaaaataactaaacttagattttgtatacctcattaatcaattattccaaaaactaaatagcatataaatatacaggcccttcttaccttgggatgaaatttaattttaattttttaaaaatgggggttgcaatgaccaaactctaggctacttggtcagagaggctctgataccatgtcattaaccacttaacctaaaagcttaagatgttaagtgaagatacaaaaatggttttatacttttgttctttaacatatacagttttaatgaaaataaaaaattgattttgaaacatttataactcaaaagaatgtcttaacagagttctttttatttgttatatcagttgtttgatactgtgatttcggtatacttgcttgtattgctttgtgagatagaaaagtaaaatgttttttctctctttttttagcattttgattgttgtattcatatgaaaggaataaatgttgtacaatctggcttttctattaatctgttgatacatgttttatcttttccgtgttcagggatattttggagctgactgagctgttaaagttaaaagatgctgaggcagaggcatatatatctgaaaatgagtatgctatctg

SEQ ID NO: 5831 - DNA, 827 bp, Glycine max
acattgaattttgctccctttgttcactgcaaaaattatgtaacgaacaagtcaaattctttgcttgttgtgaattgaccactagatactaggaataggaatggcaatgggcacgggtagtgtctaactgctacatgctccgcgagttagaaaatccgtccgtgcccgttccgcgaattcaactacttgtgggattttggcggtgatgttcttgtacatttataccatccatcttttatccattgcaaattttatcttcggatatctatgaatatggatttttttgtcaatctctacttgataaagctgaacaaaaagtagcttgtaaagcagctacagatctcctatgcagaaccgattaggactcgagccaaaggttacattcaattcaatacgtggatactgagtttcgaaaagttttcaatccaatttattcttataaacttctaaaatactcactagtataaagtttcttccaatctttagctgtcactgctgattatgttctgttctttgcagattgtataatccttgtctatgcaattactttgatgactcacttaatgccagctgcaaagttaatggggagatccttcatccttctcaccccccaacacgcataaatatttttttgtcaacttttcgaaactcgttctattttgtcatattctctgtagaagaagctttaaattttaacaataggtggatcaaaaccaatttgatataaatatgtaatggggcttggccctaagtgtacaatatttagcttgattaataatactgattagactcatatagagatttgatcaggacatacatcatgtact

SEQ ID NO: 5832 - DNA, 802 bp, Glycine max
acattgaactttgttccttttgttcactgcaaaaattatttttaaagtaatgaacaagtcaaactttttggttgtagtgaattgaccacttgatgctgctgaagctgaacaaaaagtagctacatatctcctatacagaactaaataggactggagccaaaggttacattcaattcaatacagatctcctagccgttgttgttatagggattacgggaaagtttgcaaggaaaaatatgttccctgcctcggataccgattcttctcaatttattattataaacttctaaaatacacactagagcaaagtttcttccaatctttaattagctgtcactgctgattatgttctgtcctttgcagaattgtataatctttgtcaatgcaattactttaatgactcagttagagctaagaaatttgatactcagctgcaaagttaatgggagatccttctcacccccctaaacacgcataaatgtttttataaacttttcgaaactcattctattttgtcatattctctgtagaagaagctttaaattttaacaatagtggatccaaaccaatttaatatatatatgtaatgggcttggtctaagtgtccaatgtatatcttgattaataatactgattagtctcagagatttactggttcaggactccttaataatttctcatttttattttcatttcagttttaaattgtggatgcttatcgatttgcaattgcattataatgatcaaaactagaaaaaaaaaaaaaatgagggcaatttgagcagctaccgcaataattgct

SEQ ID NO: 5833 - DNA, 822 bp, Glycine max
aaatcagcgtttatgtagaatcaaacttaataaaatgaataaattaaaatctccaatggcctcaatccaatttcctgccattacctttcatagtgatcttaacctcatcagtattttttaccgtcgtccttccctctcgatttcgtgcataattaacattcacaggagaacacttaacatcaagcagaagcatttctgcttagcctctccaatttcacgttacaagtttttcacaagtactactaatccagctatgtagaaaatgtttaattacaacccaaagccgaagaagaagaaaaagacttttacaatataactagaatgaccaggcacaagaaagactattcttcttcttttgcttcttcttaagaggaggatgagaaggtgtcaatgatggttgtgtggagtgggtcactcaagtgggtggcccagttgttgagcgggcccttgccagtggcggcagcttggactgcaaagcccaagaagcccaccatggcgagacgggcgtgcttgatctccgccaattgaagggtggctttcttctctggatctgaggccaggcccagtgggtcgaagtaactgccacctgggtacagcctcttttctgggtccagctctgcgttcctctggaactctatgtagccaattacgagaacctcgatccagatcagtgtggtgattgagaatggaaagtggttgccctaggtatgatgaaccttccactagctccaccttaaaatcaaagaccatgttcataattaattaagagcccggcatggtttatactatcataagaaaggaaacacaaatttttctttctaa

SEQ ID NO: 5834 - DNA, 852 bp, Glycine max
attgctaaatatagtaaagcaattggggggttacttgtacagaatataaaatcgaatatccatttcctgcatagagagttgacttttattttaactattcttataaagaaattaaatatctttgaatcaaaagaaaactaagcatatggtacatgtgagggaaaaagaagatgggagggaatgaaataccagggaagaatctgagaaaaaaaggcataagagttagctgtaaaaagtactaaaaaaaatcggaacacaaggggaatccttgaattaaatgtattttttttttcttctgagtagcaatttctcataacaataaatttattttttttcgttaccagcaccctttggtcttagtgagagttcggttaaagtaagacgtcatattcaaatattatgaattgagaaataaacttcagtagacttttttctctcccccgtaaatggttacttttgtttggtttggtttggttttgagaaaagaaaatgagaggattttaaaatttgaataaaagagaaaatataagaaaaaaatattatgtttatctttaaatatgattttttctctttttcctttttctttctttttaacaaaccagacaaaaaaaaatcattatctgtgttttttggtttctcttttatttttcttttcatcaaagatatcataattgaagttcagatttgtcgaggcttgaagtgacttttagatatcaggactgttatataaaaaataaaataaaaatcttttttagtgttgtaaagagtataacattttgcattgattgcaaatcttgtagcatgaaagatgtgggcagttttaagggcttgggatgtctcaaatggacagct

SEQ ID NO: 5835 - DNA, 837 bp, Glycine max
ttgcatgcctgcagaatacagaatagacatgaaaaagaaaacattaaaaaattacaatatttaaaaagttgaatgtccctgatttcattagcacaaaccttgtctaatgtcttcccttggtgatgcctatcttggaaaggaacttttccagttggaacttagaacatagaatctcaaagcaaagcatcccaaaactgtacacgccatggatctatttgtttccttgggccatgactctatatgtggtccattctaaggttccaaaccttcaaagtccacagaaaaataaaaaatgccttatcacaaagcttgtactgaacttggcaggagcgttccttttagtgattttgatctttctaaattcctcaaaagggagtttctttcttctcatactttgatgactttgacactatatatcttttcatggattttgttggaaagaaaccatctatgtcttccttccaaactagatcatagcgattgcagaagtttagattaatgaggtgtacttctttccaaatttccacttgaaaagtttcatgtctccatattctttcctgtacttgttgatttcatcttgatcccaccctgatgtttctgatgcagattctgtatgttcaattataatgggcatgtaacaagtaacgacaaagcaaagtctaatgtgtaaacttctttgaaaatgatagagatctctctcaaggactgttcaagaaacttccattattctatttcttctctacaaatctcaagagcccatgaaagactgtaaaaggaaaaaagaaacaccattatcagcaattgtgttttaagagtaaaacaaaaagagcatccccg

SEQ ID NO: 5836 - DNA, 803 bp, Glycine max
acccgcattggaaagcttgtttctggccaatgccaggtttagtgcaagtgatgatgatggctgcgccaagccatttttagtctgcaacttgttgaatactttggtccttaaagaatgttctttgcactgatgcaaaagtactcttcatatctaattctaaccttttcagtttgaacctggacaataacatctttccacatgcctttcaacacaaaattgtgctttctactccaaatcttagttctcccacaatcttggatcatttgggtccaagttgttaccaactttcctctacgtgcgatctttcatttcttgaagaaggaaatattcaaacctccactcgtaatatatattcaggttggctgcaactgctcacttataatgtaaagatattgacactttcttcgtgtacccttgagttaatactaaaagtaagatactttagtctgttttttttttcctcttttgttttcataatgatctcatatgaatatgatgtctgcattctgtgtcattttttttttttttggcctatactcaatcttgcatttcacaatatccattaaaatacgtcttcaattcactctaattgcaggatctatcaaatcatgctacaatgagaagtgagaactcaacctccgtgctttgttagattggagtcattgaaagttaaaatgaatccatacgtagaaatatgtgatgaagaagtaaacagggtagtcgagtgcttacttcagaactctccactaactggagttgctgtcacaaatgctgaaagttatgtaactggttccttgcttaac

SEQ ID NO: 5837 - DNA, 813 bp, Glycine max
aacaaagaatgaaaaaacaaaggctttaatagcacaaacatacaagacttgctgtaaaataaaagacattaccttgattccatcccaaagtttttcaacatggctttccatcatggaaagcacaacaaggttgtcagtacaaaaagttgatggcaaagacttggaagggtatccatcccattgtaggtacattaatttattaggcaatgatttgagacctgaaggaaggagcaaattgcatgtcctacccctccccatatagaatttgagaaatcttatattgatcatccttgagaaggtctcatagctcaagggcaagtcacttatttgagacacatctaagattatgccttcaactgcatcagttccctgacaaacaaaaactacaatgttagatgataaaaagtaccacactaaccagctttccagcatgtgtttaaaaagggaattcagtatatctttcttaccctgttatttttcaatacatcatagacttcttttggatcccacaatcggctacgccttccaggatctttgatagattcccggtgaacaatttcccagcccatttcttgtatcaagtcatgcatacacactttaccgtcatcagaaaaagttacaagacttttttcttgaaggatttttataccaatatatggatagaaaccacaaatttctagtagccttataacattttctatattctctcctcggaaaaagcacgcaatgtccaggacatattttttttgttcataatccagtccatcataactccattttaagacattctgaatctctgcattaggaaccttt

SEQ ID NO: 5838 - DNA, 877 bp, Glycine max
aagatagaatttagagtcctatatataggctacgttcttcccattttattctcacacaagaaaattaataatcccaatcatcaagataggaaaagaatggaggccatttgttccaagcaccttatgacatcccttgtcataattcttgcttctagtttgaccttatcacagggtgccaagaaaggcagtgacagtgaaaggccataccaagaagcgagcacggtgttcattagaacatcttgcagctccacgacctatccaagactctgctacagctccttagtgaagcatgcagacttgatccaaacaaaccgtgtggttctgacaggcacagccctgaatgtgacccttgcgtctgccaagtcgacctcggcaatgatgtcgacgctggcaaagaggcaaggcctgaagccaagagaggttgcagcgatgaaggactgtgtggaggagttggcggactctgttgatgagctcagaaggtctatttctgagatggctcaactaacaccctccaattttgagatgacaatgagtgacgtagaaacgtgggtgagtgctgctttgaccgatgagagcacgtgcaccgatggcttccaagagacggctgctgctggtggttcaaatgtaaagaacacggtgagaggccaaattcttcaggtggctcaattgactagtaatgccttggctttgataaatcagctggccaattctcatgcttaactactccatcttgtgctatatatagaacatcgcctaccctgttttttttgtctcatttagatgctctgcaactgtgaaaactagtaatatctcagtagtttcttgagatttatgtccccgctagtgtaaactgttcatgtctcgttccgctatgcgc

SEQ ID NO: 5839 - DNA, 796 bp, Glycine max
ctcgccagtcttgcatgtcttgcagctattatatgaatatgttacatgcattgtatgagaactatttgattgccactattagctgagtttactctcgaatcttgattagtcaaattaattttggaatacccttatggcagtacaagcttgagaaattattgcagcagagtttgaaagcaaaagaacatgcaggtggatgatacaagggactcacgcattatatgggatttataatcttacattgtcacatgagattggatgcggaagaaacaactcctccccttcagcatcctcatcagttctgtaacgggaaaattatgtgttagatgaagaaaacaagtgtattaggaatctctcttgcaacaaaatagtgaaaatattcaaattttatttatattgaagtagagcttcatatattggtggtatatatatatatatatatatatattcctaggaatattctacctgtaatatttctgaagcaagtctaagttgcggtatttggtttctttctgaacttgatcaccaggaaatcctgccataaacaggagggtgatacccaatgccttgaagaaaaagcttccactgcgattatgaaccaacgttgccattcggcacataagtggcccaaaagacttcagtttgtttcttcccatcggctgcctcacatatctgcattatgttattcaatccaaaaattaattactctatattagactgaatgtaaatattttcaagtgcaatattcgtttgacccatcaccatttataatgaagaaaactactggttaaaaaaa

SEQ ID NO: 5840 - DNA, 851 bp, Glycine max
agagctcaacaagtaactagtctttgttttaggtgattcgttcacattaagcagcttgggatttcatataccacctatatatacatatatatgtatgtatttaatccttttattacttacactataattgattcaattcaagaagtagcagtcatgcaatttatatttaaatatatataccactagaaatttcagagagattaaggagggcagaagacaggcccattgcttcttattcacttccttttgttggacttatcctctaagtacttagtcattgggccccatagcgataaacaagcagatagtcaacaaaataaattctttttgtgtgcttttacattcctttttattaatttatatatatctaataattacttaattaaaataatattaatatatttttaaaatattttttataaatatatatatttcaatattttttttatctatttttttattattaaaataattttatgtcaatcaaactaatttaatatgtttttatttatttttatagatacattctttcattggacaagatgacttattttaaatggaatcaaaccattttaaattttatcaatttttttaactttgacaaaactttaaataaaaataaataaaaactgttaagcagattttattttattttttattttgaactttaacttttaagtaaaaaataatggatgaaatgtaatgttagttaatttttacaatggattttatctgttgtatcaaaaaaatatacgtttttaaaacttgtaagaacaacttttattgggctgctttgctaaattagttaatgtggaatagttattagttcagcttcattatatgcaatcaac

SEQ ID NO: 5841 - DNA, 817 bp, Glycine max
tagagtcgacctgcagtaaggtcgttctttgaaaagcgcttccagaatagagttccaaagatatacattggaggggatacttttccagtctatcgatagccatcaaaatgatatcatggtgggacgtttccaggaaaacgaggtcaagaaggcagtgtgggagtgtgggtctgacaaaagcccagggccggacgggctgactttcaaattcataaagcaattctggcccattatcaaggctgatttcctgcgttttttggacgaattccatgtaaatggggtgtttccaaaagggttaaatgcatctttcatagctttaatccccaaagtcctagatccacagaggctaaatgaatatagacctatctcattgatagggtgcacctacaagattgttgccaaggtgttggcgaacaggttaaagaaggttatgcctttcatcatacacgaaaggcaatcagcatttatagaaggccggcacatgttacatagtgtgatgattgctagtgaggtgatggatgaagctaaaagatgtcataaaccttgcatagtcttcaaagtggactatgagaaggcatacgactctgtacggtgggatttcttgttctatatgatgaatcgaatgggtttttgcactaagtggattgcatggatgggagggttgcctaaagtcagcatcagtttcggttctggtcaacggtagtccttcagccgagtttgtgcctcagaggggactcagacaaggagacccattgtcacctctcctttttaatatgggttggggaggctctaaggggcattatgtcacaagcactcg

SEQ ID NO: 5842 - DNA, 833 bp, Glycine max
aaacaacaggaaagaaagccctacaatagaactattcattaacccaatgaacaagcaatgtgcatatacaattactgctatgatttaaactcaatgtgcaaagttagtttgactctgcaaggctcaataaaccagtcctaaaacaaacacctacgctttatagacatctccgaatgatccctgtccaataagctccaatgaactgaatctcgatcctgaggcctcaactagacctgccacatcagccattctctcagcagcaagtactcaaagcctcatacacagactaaaccacatgcacctgaaaaaccaaagagcacaactcagagatgtaaatagtgaaaatcacaaatctcaaatctccccacattctccaaattccaccaattaaaataaaatcaaaaccaaacttccacattcaaaaatatcatatttcaaaacagcaactttaatttgtaagcatcaaagcgaattaatcaaataaaaaaaaaaaactttatacacaattgcacaaccccaattcagcctcaactcaaattctaaacgaatgaatcaacaaatcaaagcttaataaacaacaattgaaaaaaagaggcacgatgcagtgaagctgtggactgaaagcaaagcatgtgagagctcggtggagcagtgcaataattgttaggtggaagttaggatgcaaaattgactctgcaacaaaatggaatgcgcgaatgacactgagatttcgttcgcagagaaattaaaaaaaaaaaaggaaagcgaaaccgcaacacccacatcgagatttggcacagcagaatgtggcattcgaattagattcaaacttc

SEQ ID NO: 5843 - DNA, 864 bp, Glycine max
aggagacataagggtttagtgtattctgagggagccatggttcagcaataccactttggaaggtgggtgatagctgggaatctggcagagcagcttgtagagtgctgacatcaaggaattgcaattggcactgcacacatgttacaaacaacaggaaaccaaacaacaagttactatctttctgtctccaatatcccaagatccatattgtgaaatttatatcttttgatgcagcattaacagttgagcaacttttttagctagattgaaaaacatctacatagcatgtaaagaagttcaatacaagcatggtacaagttcaaattatggtgatacgattacatgtatgaatattgcatatttgcatcaacaacactaaaatctcaagcctgtttctatttttctaagtagcagttttctggatgttaaatttcaaacgtaatagagggagagattcagaattatgactttataagcatatgtcaggttttagaagtgagaaaagtgtcaggcaaaatgcttcaataataaaaaaaggatctttctagaaaatctacacaaaaaatagccatcagagcaaatgcagacggaggacatggtgagccacaaacaaaatgcaatgaaagatcatgatcaaacctagcaacaggcacaatgcctagcataccacctttattggatccctggtagaagaaaagcatcttgagaatttctttaattttcaaaactgtatagactatcttgggtaatgcaccatatagataccaaccttagaagctcttaaatcaaaaaactgatcatcagttgatggaagaacatgcatttgtaacccttgattaagggcatccaaggaacagaggtggg

SEQ ID NO: 5844 - DNA, 882 bp, Glycine max
aaaatggttacaaccatcccaaggatcatcattgtttgtcagtattctcttgggtcagtgcggtcagtgtttgtagaaacagcgaccttgctgcatctggggctggcaatggttctgttcgattatgggaaattgaaagtgatacaaaagacattaagtctctttgtaatgtgccattggtaagtgaaaggaatagcaactaaactctagttaacttttcctagattaatttttcatagattttgattatagcttctgttgaaaaggctattgttgttcttgtttctgttgaatgtagcttcttctgtaaatcactaaatcccttgttatttattgaataactctcccctttttttcaaaccttacttttttgtgccatgtgatgttaacataagcttgtgcagaatagagattgtatacttgtaaattcgtacatagatttgtagttttatgtaaaaaatcaagttttacttttgaagtcaaaaagtaatttccaaacatgcaattcttcatctttctagtgttggatttacatttgtactgagttttattgcagttgaaaaatccactgccatttaatttatccttttgcataacaggctgggtttgtgaattccttggcttttgcaaaatcaggagaattcttagttgctggagttggacaggtgaaaattttctcaaactgtgtcctgcttgtatgcttttttttttgtatactatttactgaaatttcactggaaacactgtcatggacagaaaagttatctgagcatttcaactttctagtttgaaaggtggaacttttagtatgataatataaggaaatcgataccaggttatcttatttatgactcaccacactataggtgatttattatgtct

SEQ ID NO: 5845 - DNA, 908 bp, Glycine max
cctgagggttgtctacaggttgctttgtatccttgttttgtgtatatgcaatcttggcacatttgtgcggtatattctcctctaataacgagccagcttatatggaaacagtctaccccgttttcaggtttcttcacattgttccaacttgaacacatttctcacattatatctttatttagacacccttaaattgttacattaattccaaatattaataagggtaacattgagataaaaaattctactaggtagattacaaaatcctatatatcttttttaacttgcctttataattataaaccatgaaattaaatgaacttaaactaaacagattgtaaaaactcccctgaaaatttaatttgcagaattttagacaaaaatgactatgttattggtgcactaataatggttacaatgattttgtgcagtgtgtttacattgttaagcctgcacttgtttatgtatggatgcaacctgttcatgtggaagaatacaagaatcaattataatttcatatttgaattctcaccaagcacagcactgaagcacagagatgcgtttctgatgagcactaccttaatgacaactgtgattggggcaatggtcatacatctgcttctaagggctgcaaacttttctcctacggaaattgatgccattcctggaattcttcttctggttagtctaataactattgcttttcctagttattttataagataaactagcttagtttgcttgaaatttgggaaagtaatttataaacctttatactgattatgaaattcgattttcagttttttcgtagtattgctcatttgcccatttgaccttttttatcgcccacacgttactgcttcatccgtggtattcgcacatagtatgctctccctttataaggtaaa

SEQ ID NO: 5846 - DNA, 859 bp, Glycine max
  misc_feature (836)..(836): n is a, c, g, or t
aaaacactgtcgcataagtaatgagaaaatggactaactgattagcaacattttcaccatcccttttgtgtcacagatattaatgtaaataactaacgagttcgattgttatacacactattggtgtaaaaaaatttacaccatcaaccagtcacaattcatggtaacattttgggattggttatctgacgttgtcaaaaaattttacattgctagtgtatatcaattaaatccataactaaaacttttcaatgcctcatgtaaaaaaaaatatcagcaaccaaatgttttttaacacatgtacttaaaacaacaacacaaaccttattccagtatgtgagtatacagacatacgtaaaatgggaaagaaaaatgcatcatgagtagcataaaaatattagtattgcaaaataatcagacaatagtacctgctggttaattcatctagctagaccagaaactacataaaattgataaaagtacgatctttcaacaaattgagagaggaaaaaaagtttccatggacaaattgaagcttccttaacaacacattttgggcacttgcaacttgctccttgtaagttgtatattagattaggaaattcgcttatgtgacacacaaagataaaaatattatgaaattaatgttcacgtggacatagagactaaagttactgacaaatatgtctcattaaattaacaacttattgacattttcttcttttaaaaataagtgtttttttgctcaaaattttgtgttctactatcatgcggcaggtaagaaaataccttcttttgtcataataattctgctggccacaagaaactactctagngatttctaagacaatggagctaa

SEQ ID NO: 5847 - DNA, 897 bp, Glycine max
acaacaatggtttgatgatagaacttgatatttgtcaatttaaaagtaataaatttgactaggtggactaacccttttcgtcacgtttctgttgagatgtctttctccgcagaataagcaatagcaccaaacttgttaagaacaatattaatagaatcactagtactccaatagaaattcctagcatcaattgaaaatgcttcttgttccctttatgtagttcaggattatcatcaaagctggaaggaaaaacagatatctgttacttcaatcttggtactaaactaataaaaaaagatcctcatcctattatattcacacttaagttgattcaaattcaaattcaatccggtgtttagcttcttcacttaaattgacctgatactaggaaaaaaaatgtttttgatgaagatacttacttgaaaatgatttttccagacagtaatcctgatggtattaccccactaaatgagttattctgtatgaacctgtcatagacccacagatgtgcatggtgcataaatgtctgaggataacaaatgtgtttagttggagaaattcagggttaactaggaaaatgcttcaaactctcgaagtagagatgataaacatggatggttaagtgctacatacagtgcttgtaaacttggcaagctacccaagtaagatggcaatggaccagtcaatttgttgttctctagatgcctgcatgtcattagttgaaaaaattaaaataagaaaaaatgaacatagaattgggtttgccaaatattgattccatcccaacccttcgatcataaaagggctatgtgtgaaactaaagaacttacataatccttacattgataagaatgctcatgtcaaggaagtttgtccgtggagcatgttgccatctaa

SEQ ID NO: 5848 - DNA, 858 bp, Glycine max
tgcaaattttatggaggatatacagagtttggaagtacaaatgcagcaacaagacttagacttggggaggggattcaagtgggaagtattcagcgggaaatgcttatatgcttcccaatagagtcttgtcatctatgactcaggatgaagtgtttaaagcaatatggaaattaaaaatgccaagtaaagtctcaatctttgcttggagattaatacaagacagattgcctacaaggaacaatttacgaagatgtgtggaaataaatgatgctagctgcccattttgcagaaatcatgaggaggaaatattgtgggggcattctcagaaatcccgaaaaaccatttccttcaactttcttattgtaattctgatggttttaggggtaaaagatggcagagttggtggattgccctcacttggtgtatttggcattataggaataggattgtattcctaaatgaaagtttcaatggtcataaattgatgaaggatgccttattcttctgctggacctggtttaaaaacctggaaaaaggatttgatatcccatttcactcttggtctaacagtattagggatgctttttgtaatcaggggaggaatagtatataaactttacagatcctgtgtgtggggtggttacctagtttacagccagagctttggttccctaatacttgttctgtatactgtattagttaaccacagttctgctccggttgatgctaggctgtatgtaaatcagtaccagttgtactgctttctctattatttataatatatatctatttttggccgatcaaaaaaaaattaggcttttctctatttcaaaacatatatggttaaataaagaagaa

SEQ ID NO: 5849 - DNA, 872 bp, Glycine max
  misc_feature (765)..(766): n is a, c, g, or t
  misc_feature (853)..(853): n is a, c, g, or t
ttgcattgcctgcagcagcagcaacaaccatcgcagagaaagcaaccttagtttgttttttaaaactgatttggaagattgatttgcataaacaatttgtacttattttttaaagttgatgtaccgatatgattaatcgtgattttcaccttttgtggttgttaaatggattagtttgattttttaattctcaaaacatctgatttctactaacactgtcaattttttcaattaatgaatgtatctattaacttgtgtcgcatgattattggttgatcagggttatatctaacataataatttcaaactatttaataattttttattttggagggtgtctaataataaccgtgggctttttaatcgtatatatgaatttggatttcagtagttgagtatgttcaataatctaagtacataaaagatcatgagtgagtttgttaaaattttaaaaagtaaaataaaagaagcttttcaaaaatatgtttttttaagaaataaatgaaatttgtttcttaaaaaactacttattttaaataaaaataattttaaaaaatacataaagaacaaaaacttatttattttactaaaaaagtatttcttttttaaaaaacaaaaaagaagcttataaacaaacgaaccatccaaataaattattacagacacctttcttgaaggaaaatattacacggacctaaataacagataaatttttttccaatcagcattaattttttttttctttttgggaaagaaagcacgtgnnctttgtattttgctttaatggtataatttcatgtgacctgacttaatttcgttggaaaataataaaaagtcattaagagtgaaaggnaagcgaaaaacaattcatt

SEQ ID NO: 5850 - DNA, 809 bp, Glycine max
attcatgaatgaaatgagcctttcctaaattttatcttcttcttcttggaggtcactggtcctcgaaaccagatctttaatttcttgcatgtatcaacagcacacacaagaacacagcacaaggggactgcaattagacaaggaggagacaagcactaccctcagagccaaaaggaaaacaaacaggaagatttcctaaccaattccgatcctaagtgttgagctggcaccttagcattgggcaattagaatattctatctgctggaatatatctttctgttaggatatttccaaaatccgttattgctagcctcctttgtaggacctctagaaggaactagaataagcatttggtacctataaatggacaattattgtaatagaaatgcaagcagaaatataatcagaaattccctctcttaatctcccttttttggaggtctcctaatcctcgaattttaggaacataacacccgtgcttaagctttggaacaatttcttaactgttttatgaataaatagtcattttcgtcctaaaaaatgtgtaaaactgataattcattcttaaaaaatgaaaaaaaatagtctctgaaagtgtaaaaagtgaaacaaattagtctaagagctaacttctatatgttaatgttaagaaactcacatactcatctagagacaaaaatatcatttaattgatgctcatgtgaacataaagactaaaagtattgacaaatacacccataaaattaaataacttattgacatttggggtccttttaaagaaacttaatgggtaaatatatcaatgaaa

SEQ ID NO: 5851 - DNA, 905 bp, Glycine max
cgccagcttgcatgcctgcagaggttgtgaatgtaagtgccaaagaagatttggtcaagcaacatgccaaagtcgctgaagaagctattgcaggtgcataatatgttttcaatgatcagtgcatattccctccatagctttctagtttctagattttgcaataacacaggttatactctattaattggttacctctctgttcttccttatatatgttgtgtcgtgaagcttgtgtctaaataaattcatccgactgtggatcattgagcaagaaaattatcaagtagtttcgtcatcaagaagagggtttaagagatactgcatgagctgtgtcaatagtagtttggtttaagtggcttatatgtaaatgatttttgagtatatatttcttttcttctctttctctttctaccacttttagattgtctcttaactgcataatttccataaacttacaggctgggagaaggccgaaaatgaagtgacaagtttaaagaagcaagtcgaggcactgactctcagaaattcaacacttgaagatagagtcacccatctagatagtgcacttaaggagtgtgttaggcagctaagacaaacaagggaagagcaggagcaaaatgttcatgatgcagtgctaaagaaaacacaagagttggaatcagccaaaactaaacttgagaagcagctcaaggagctccatagcaaatcagatgcttcaaatgctagttctcattcatcaattgaatttgatatgatcccagagggttgaatatttggagaatgagaacatggctctcaaacatgagctcaaagcccaatctgaaaagctgaaactcaggacaatagagagggatttaagcacccaaacagctgagatggctagcaaggcacatctaggaagcatc

SEQ ID NO: 5852 - DNA, 887 bp, Glycine max
cgatacgccaagctgcatgcctgcagaaagaaatattgattgcctacagtagacatttggttgttgctgaaatgatcatatatatctacaaggatccactcagaaagctttctttcatgaaattgccaatggcactagtaacaaccttttgtcctcttagttattataacaaattcaatttgagcatgaactagcaattttaaatttacttaaatgcagtggatgatgacaaggcaaacttaggaagaacaaaaatatgagtttgttcactatttgtctcttttttcatgtcatattatttacctatcaaactacacctctttctcatctacctctatctctctaaagtgtcaaataatacacaggttagttcttataatgaaaatttcggtttcttgtccaggagtaggaatatgagtatatgacgagatgtatgaaagacacaattgatgaattgaacatcttctgtgactaataatatatagtttgcaaaacaatataacaaaaaactaacaataaaaaaatgcataaagaaagtaggaaaacacactcgttattttatattatttagtgtaagaatgattagaggaccccaagactttgcttataacagtacaaaagtttaacattctataataattaaaaaatattggagatgcaggggatcgaaccctgtacctctcgcatgcaaagcgagcgctctaccatttgagctacatccccattaaaataagcattgaattaattttatatcttttaaatacaaatctgtagcttggaaacaaaatcatgcacaacaaagacatgcgtgtttgtaaggatcatcgtgccacgaaatagaggtccgtttactccaagtctaactcaattactacatctattctacc

SEQ ID NO: 5853 - DNA, 875 bp, Glycine max
cctctagagtcgacctgcagaagacaaaaaccccaaaaatttgaaataaccttctctcacgcacccttcttcgtctcccactccacttcgtaactcctcaaccacaccaccaactttatgagcttgaaatctacaccaccgcaagagaaaaggatgttatattacgagatttctatctacacccatgggaagttatatatgcagtcgcatgacaattttcaaggatgaagataaaataacaactaagttcctcagtttgattttcacaatagattcgcgtggtgtgatttaatggagtcgcaagaagatgaagttaaagaggaggaattaaaaaatttgtgatattttttttttattttgtgatagcttttaatcttcaaaaataataaaaaaaaataacatgaaggagtaacacataaaaattatattaaattaaacttaaccctaaataaaaagtgatgtattataattttatgaagacgaaatttcttagagggattaaattcaaactttaatttactaatcttaaacggatatagaaaatgaatatacccttttttaaaaatatttttaatattttcaaattatatcatacacatttatttataaattgtgcaatgcgagtcactatctagttgtcatgttcggaagctgggttcatatcatacgcatatcttcaagcagaatctcttttatgttgctatcatgtcaatctcaacaaatcaatggctgaactcaccgaaaccatgatgtcaactgaatataaacaaatgtgggaaatgaagaaaaatggtggcgacatccaaatccttctttcccctcgtattttgagggggttggtgtaacacattaatgtcgggtgtgagcaaacacca

SEQ ID NO: 5854 - DNA, 861 bp, Glycine max
agcttgcatgcctgcagcatgaagctcgagaccgcttcaccgcaaaagcatgagtgatgttccttctcaaaacacacttagatgttggagatagcatctacataaaaccaatctgaatcagttatcaagctttgaattacatagaataggcgtgggcagaagaacagatgctcttttaaactcatctaattacaattacaaagtcaaacctcaaaaatctcacaatctatatccaaattggttgccttcattacctgcaacaacactaataattaagcaattttaaaagttataactacaatgcaattgttttttgtcaataactacaatgctattcaattacaaaattacaaaagcattgcctgcatatggcaggtactatgaattacaaggacttccttggtgtggaagtaatgagcaacattttaatctgacaacaataaaagcattaaaatctatgtcatgaacaactagattggctatgcataaacttccctatgagtaatgaatgattcaacattttacagtctaatcctatgcaaagggattgcccccaacagaagcaactggtccattcgtctggatgttcctgtaaataatcaactcaaaaagtcaatgagcatgctcctaaaacatagaaatggccatattattggaaattgccaaatcaaactttatagagccactttatcctatcagtacacaagaagtgtaggttaaatttatatatgcattgcttttatcctcctccatgatgtaaatcaagttcaatgaaacaaagcaactatttgtaatactattaattacaaataattttaaaataaaaataaatattttattaaaaagttactttggggtaga

SEQ ID NO: 5855 - DNA, 820 bp, Glycine max
gggatttgtcagagatgcaggtgaagaggcaaatccagatcttggagggtcgacgatgcagacaaggttgagggcgaagtaacacgtgcgacaacaaggggcatgtaggggagcattggcatcaacctcatccccttgtcagaatatagaacctaaaaaatacaaatttcttacaaaaacatggacccaataaaacattaaattaatattgagtagcagaaataattagcagtttagcacgtttagaatttatattctgggctagaagctattcacaatagctagaagcatcactaatccccattttagtagggaattttaatggtcactttggatgcatcagaaggaagaacaggacctgccttgagtgaacttcttactgactccaatgctcgggaagtttgaagagccatctcggcatggagttgtatacatgtcatagccatctacacaacaacaacaacaacaaaaaccttaacttaaacatatcatagccatctatagtttaaaaaaatatttggagcaggaaattaacaggagttaaaccaaacaatagaagggggatataaggggacaagggggctttgcaaagctctacaacagaataaaaaaggccaatagtaaaaatttctaggataataacaagctatctgggttaatattttaaaggcatatacattgtcatgaatcattaaaataaatatgaaaatagaagtgcacaatgagaccaagtgatgtaccatgacatacgttttaagtaactgtaactatatttgtaaccttatcaccattaaataactctagaccaatgtatagaaat

SEQ ID NO: 5856 - DNA, 875 bp, Glycine max
agcaccttgatacagtttccatctcttgctcaacctgtctgtcacagacacaaagcaagaaatcgatgttgatagaacgtaatcctaaaccctaataattttcttcgggtaaaggatagagagctcaataaattgcgcaaaaagaaggtgggttagttacctcattagtgcagaaaagggcaatgagcttcgaaaccctgccattgacaacctcattcttcgcactgcaacagacgcaggatcctaatctaagaaaatgtttagcttggtacggcgtcgtttctgctttgcacagactgggccacactaattgggcttcgaacgcatcacaggaaggcccaacaactaggatatacgggatgaccctttaatgtttttgtttggattaagagaaagtttgacagataacaagttttttcatgttgaaaaattatgattcctgataatcatgaataatgtgattcatgttgtttttttttaatgaatataatttatttgattagtcattaagaatctataaataagtttcaaaagaattaaaaaaaactacacatatttttattgattattttaattatttattggattatataatttaataaaaaaaaataacatgatcattttattataataaaataaaaattaaagtcaaaaaataagattctcacctccatgtgagaaatttttttatgagaaattgactaaaaaaacattttcataaaatattatttttcagggaatgttattttttaaaaaatgtataatatcaaacatgaaaaacaaaaactcttcttctgcctaacgccacctatatgggtgatatagttctatagatacttgcaaataattggcactgaaaattctcatgtttctac

SEQ ID NO: 5857 - DNA, 875 bp, Glycine max
tattggctatctaataaccatggctagtagttgaaattgaggattcctagttggcatccccagaggaaccttgtatagaaatcaaaaacaccagtctctgttggtggcatacttgttccctaattagagaaagtctgatatgtgctccttccttcagatctcagaccgcattcacttaaccttatcatgtcaactatggcgatgaaaaatagaattgtatttattacactttgatggaaagaaagtagtagtatttatttgacttgcaggatcatttattagccagagtacttgcctcttcgcttgtttggttttattaattttggaatggatttatttataggcattacttgaagtcattttcttatcctggttatatcacttatatgcaactctagtgatatcacagatactgcttctatttttccccctcaatcaaaagtaattttattggttatgtatatttctttcaaccacaacgctagttatatccaatttgatttattaatgttgtttgtctgttagaaatgattttcaggactgtcaccagaatagagcgcaagattatttatgatttaatttaaccattgaagtctgtaactccattgtgttaacaataaaaaaagcgaatactaattggtaagtgaataagttgagtgagttaaaaatgatcaaaacttgctttaggaaagattgtttagctctggtatttaatcatcatctgacagacatgatacactagatgggaattgaaatcaattacatcaaaaacaaaatattttctctgaaaacaaaaaaaaattaatgatattttatttgacacgccctagggaatactaaatttatgcataaaaaataaagatattaattaatga

SEQ ID NO: 5858 - DNA, 881 bp, Glycine max
agcttgcatgcctgcagagaaatttttctgccttttttcatgtaaatatcactaaaaaatttacgtaaatcacgtaaaacattgatattattattaaagtggcctgtattaattattgtctaattcatattaaaaatgcatgtcaatcagcccttaattgcatcattaattaatatcattattcttttatgcataactttttttccatttataatcaaattaactatcatttgtaacacacgcggaatgatttctgaattaaattagcgaggagtcgtttcgttaaccaatattgcgtagtcagaggctttttatgttaatagaaaaaattgaaaaaaaatgaatgcaaaaaagtaaaaatctcttattattaaagcgaagaagttttgcggaaaaaacttacagcctattttgcatacaaatcccgctcaaaaattaacgtaaaatattgatttttttggtattcagagaaaatattgatattattattaaagcggtcggtattgattattgtcaaaattgatattacaaacgcatgtcaatcaacccttaactgcattactaattaatatagttagtttttactcataaatttagttctcttatgtaatcaaattaattatccatctataacgcacaccgatgattgatttccaaattaaattagggagaagtcatttcattaaccaacattgcgtagtacgaggcttttcacattaatagaaaaagatgaaccaaaaattgagaaaaaaattgaataaagtagaaagtagtcaaatctcttattaaagtgaaaaagttctacacagaaaatctttccgtcttttttgcatataaaatccgctcaaaaattcacacaaatcacgtaaaatactatatat

SEQ ID NO: 5859 - DNA, 895 bp, Glycine max
atgatatatgttcatggaaacgacaattttattgccctcagcgtatgaaatgttttgctatggccgctaaaagatccggtttgaatacgttggaggcctattttctcatgcacaactttgaaacttatttcagcttccaaaacgattagtgatgggccaaaaaatatagtattacctccggtcttatatttatccataggaaataaaaaataatattttcttggtattaattatgaggaatataagattatttttttattgttattttattttcctaattaattatgagatctattaattttttttggataagtgtgagatctattaatgatttctcataaaagtggaagtatttattgagctatcaataaaaaaaaaaggtatacttaatagaaaaattatatatcccttaaatcatttaatataatgggtgattttgaaataaaattcaattgataaaaattaattaatctaatcattcttattgatcttgatcaattagataattgtttcttattaataagatcaaatgagataatttttattttataagctgattttataggattgagttagtttataattcagaatagttttaaaaaaaatattttgtgatgagtgaagtatggtggggatggaaatggacagaaagaaaatataataaaatcatcttgaaaatatgaaatttcttccatcggttgttgctgtataccaaaccttcacaagaaatggttaaaaaatttaatagggtgtatttttaatttttcaaatccagtcgtcgttgctgttcactagctagtgggagtcatcaaactatagtattttccaataagaacaaaacacccaacagtcattcataaatcaaaaccagcttctgccaaccttaataaatgtg

SEQ ID NO: 5860 - DNA, 913 bp, Glycine max
ttgtaccttacatacaagaaagagaaacacttactgtgcaggttatcaaggtaaaaaaaaataaaaacagaaattaaataaaaaaataaagaaaaaaatttgctttcagattaggatatgtgacaaccaaatacaaaggacaaagtcccgccaacggcgccaaaaacttgttaactgattggcaagtgtaccaattttatcacaagtagtaaagattaaaacggaagaccgagtgtcgagtccacaagaaatttgtttgtagttgccttgatgaaaacttaatttgtaagcaatagagaaaggagtataatagaaataagaagaaagaaagaaattgaatttaaaaggcaagaataataaaataaacaagatgagtgcaaaagatgacttcaaaatacaattatgttggggcttaacatctctgactacccttgatgtaatattaatgtttttctctactaattgatttcccagtttccacccacatctactaaggtactcaaccctaatccctcatgatgaaaagcctaatttatgtgtttcctctcccaaatccctttgcaaaggttgaataataaattgcattaagtatgaagatgtatgcaaaggcacaacaaagtcactctatccctagcaatgcattgttaagatgtctttttcaattctttagacattaccatttcccaatctataacccctaaaaataaatgcatggatggccaaaccacacaataaagatgaagatcagaaaagagacaatagaaattgaaatgaatttgcattaatagataagaagaaacattacattacaagggcattggctgctaggctcccacaaaaggggtttagcctctcataccatgagaagctttacacttcagagcttatagaagaagggattggatgataatag

SEQ ID NO: 5861 - DNA, 848 bp, Glycine max
agcttgcatgcctgcaggaggctgtgtgggacgcagatattgtgattaatggcttgccatcaacggaaacccgtgaggtatttgaagaaattagcaagtactggaaagagagaatcacagtgcctgccatcatttccttagcaaagggtgtggaggcagaattggggcctgaaccacggataataactcccacgctaatgatcaatcaagcaagtgagatacatttatgttcatttcattaattgtttttgtagtgaactatgttgtttgaattctctgcactttgaagttccctgtgtctgtatattctctggagcatttgaatacatctttgatgataaatttaatcctcttttaatgtgatttaaaccttttttttttacagtgtggttctgtgtttagctattttcttactttatgtttttgtttcattgtcctgtaatttgaatttttaattcagtttaattttgttggcatgtttatagtttatactaactaaatgattttttttccatccccttcactgtctctatcatgttttgtagctggagtccccattgagaacatcctttaccttggaggtcctaacattgcctcagaaatttacaacaaggaatatgcaaacgctaggatatgtggggcagaaaagtggaggaaaccactggcaaaatttttgaggcagccccactttatagtgtgggataatggtgaccttgttactcatgaagttatgggtggattaaagatgtatatgctattggagcaggtaaaaactagttaatgtggttacattgtagagaacaacttagtagaagcaaataggtacatacagttttttttttcaaaaa

SEQ ID NO: 5862 - DNA, 813 bp, Glycine max
ggtacgttttctaggagtgatttactcaagtttttaatatgctaggaaggtgaagattacaaacaagctacaaatttgtgctattatttggttagacaaattaagcaatgttgtatcatcagatagaagattccaacatgcccccatattatctttcattgattctaaatttttaaaacgtatcaaccttttggtttagtctagaacaagtttaaaccccaagtttttcatcaagtcacctgaatcagaaaactctatgcagcagcatatcaacccaaccgaaagaagatcgggagcacagggaatatgaacaactacaatgcaagaaagagagagagagaagatgaaaaaacataagcttactaatcggtactcaggagcctttgcaggtaacttgagataagacatgttcttaacctcataatcccataaaaaagatgtgtggtgtatccaccggtgcttggttatagattgagcattaccaccaaatttgcgatcaccaaacacgtaatctttgaacacaaagaaaataagaatccaattagaaattcattataagtttcatgaaccaaatgttgaaatttaaagagactttaaataaaccaatggaatcagtctatctgtttctctaagcgaaatctagagctacgtgtgctccaaacgggatgcctacatacatgttttttgttgggaaaatagaaggggccaaaaaaaaatatacagaagtagacagaaaattcaggaatttttatttttggcatgcttttcttcaacatatatttgtgtgcttttctgaacgcaataaagtttgat

SEQ ID NO: 5863 - DNA, 821 bp, Glycine max
acattttgaattaggccaaatagacagatccccagtcgatattcatcaccaattcaccttgattcaccatcacggctccatatttttttggtaataggtattctttggttaagagttaaatattttcagatactgagatttatttaattaaattgattttttctaataaatattttttcatacacacatgtttgattacatatttaaattataagattacatatcatactatacatcctaacatcacgattcacgggtacatatttcttcttcttgttttttccctgttaattagtgccaattgtttatttattttgctgaaccggtcatcatcttattaacatatccttacaactttgttcattcaaagctatcgttttaagacaaatttaataagacatttgggtcaaattagacgatgagcttgagagtgagatgaatatttgtattttagaccactaattttgcaagtggtaaccccacttttctttcaatttgcattcttttatgttcatgtactatattgttcagggtccacaaaatacatgtgacatcttacatgatactctcagacacatgttaaccctccacgttagccttagaacaagaacatgaacacttggcccttagcagctgagctccctaactaacaggttatctctaatattttattatgtgaatatatttgaatctccttaaggtataattatctactagcttttatctttaagctacgtattatctctaacattatctataagctatcgactcttatctataagccataaattatctgcaaggctataacagtccctacaaac

SEQ ID NO: 5864 - DNA, 827 bp, Glycine max
  misc_feature (804)..(804): n is a, c, g, or t
gatttttcatcagatcaaagtgtggacattgaatgaaaaaggaaagcggcgaatgaataaagcgagaaccacgtgaaataatactatatagaactaacacaaatgtaagtgtttcaagcatgttggttaaataatttataataattttttttattatgagataaaaaattgtcatgtttatggttttttacattcttctattaattatataataaataattttctaaatttcttaattaatagtatataaattctaaaacaaggaaaaaaaaattaaaatactaacagtagaatagtaaacggtataaatgtgaaccaacgtcacaaaaaagtttgtgatcacaagaaacatctcgtgtcaaaagaagcatctcgtgtatcgtctcctaaaaaaaatggaattgatgtgtcattgttcgagctttcttcttccgccggagaatcctaacacgacgtgttcgctttctctaaagtacgctctcgttgttctcaaccaaagcctcccgagatttgctcccctgctttgggaccacggtatttcttcctgcaccacaccctcttcttcctctttagaatattgattcatgcattgatgtatgtctatgtggttgctacagctcaagtgcgagtttgtgctgatggaggtgccaatagggtgtatgatgaaatgcctcttttcttccctcatcaacaaccttcccatgttcgcaccaggttcctacttctctctttaaggcttttccttttttttaagaaaatttttaatcttcttctaagactttgattctctctttagcttatttncgtttccgtgactttgtgtttgt

SEQ ID NO: 5865 - DNA, 705 bp, Glycine max
  misc_feature (636)..(636): n is a, c, g, or t
caaaagccatgttatgacttaagagacacaaagcaaaacgtattccgagggaaaaaaatattagattggaagtggttgcaagggaataatcgagcacaagtagggttgagtatgttatgtgtaagagtgggccaagatgtatttatagaggccaatttatgttgtatcattggagtattatattgccttggatggtgtggcacgtggcttgtaagtaatggagaataatgtatctgtaaaatattgttttttatataaatgaagaaataagagaaataatcaatgttccttttagattcgaagtcacgtattattttacacaaaatgagttgattcaatacaagcagtgttatgataaaaagtacaatcaatgtcccttctgctagtgttgcgcgcgacgattacaatgattacctagttgagttgcgatgccattgatgaaggaggaaggatgcaggtctgagagcatggccgtgtggcttttgtgtttttgagatttgcattttcggtggtggcgagagaaaggaccgccagagaggaagagtggttggtatcgagagggaggagtggttgccggaagttgttggggttgagaatgtcggttgcgagtcttgctagtggtctcctcctcgccgncgctggattgtatttgtagggagggtggggatttgggggtttgatttggcaagtccatggtttggagag

SEQ ID NO: 5866 - DNA, 855 bp, Glycine max
  misc_feature (834)..(834): n is a, c, g, or t
ttccccttcttctcttcttcctctttttaaaatgtctcatgctttcacactctaactagaaagtcgtaggtgttgtattttggctatagcctaagatcatggtatttcaaaaagattttgtcgtaggtgttatattaaggaactttgaaataaattagtaaaagcatggatttgcatgcatgggatagagttaagtgaccaagctccaatacaaatctttcaatttgtgtccctatgctggctatgcatgataattgggtctcttaaaaacatggtacagtattattttttattttcatcttaattaatgtaattttttattatctaaaacatgagatagtggaactgtctaatgttcaaacttcagatttcgaaaaggatttatataagcttttaatctaataatttatttttcttatcaattactataattttatttagagttaattaagtttttagtctctcaatctttttagattttaattcttaatccctaaagattttcaagattttgtagaattttctttctgaacgttatcaacgaatcctctccttccccctccatatgccacataaaatagacacacattgtcataaattaagttagcaaggaggattctgtggcaagggtaggtttacaataacaactctatcggtcaatgacctttgagctcaaatgacactgcccaaattcttaaagacttggtgtgatttttggtgttggacactttgatcctctttagggcgttgctttcttgtacctccaatttgttttctgcacctttcagttatttcctgcactcttttcgaaaaacttttttttactttcatggncatgttgggagccaaaatttg

SEQ ID NO: 5867 - DNA, 834 bp, Glycine max
acaaaatgcatcttagtttatagaagaagaaaacactaattctagcacggtattggcagctcaagaattattggacacaagaatcatgtgggagagaattaattcaggaagaatgcctgacacatactattattagcatataacattgcattgtttgacaacatactaatgaatgcaattagccccaaacaaacaagatgatgctaacaaatgcactaattaggtttttagaagtttgaatttctttttgttccatagcccatcatatgttcttcgtgctccatcagaaaaggaccaacacgaaaactgtagtagatgtgaattaccataaatttattgtgaacaattatatttatatcaaaattactctcggacaaaattcccatatagcagaaaatgaaacttctctagagagcagactcaagcatcaaattgaaaacatttcattgattatagcaaaagtttacatatgaggcatactccttaatttggcaagactgatttaagtagctctatgatttaagcttgagtttaactttaaaagcagagttatatactggcttataattatgaatttgataatagctgcaattattctggtaaaatatgcaatctataactataagagtaaatagtatccaatgatgtaagtggtgtttcaatagaattaaaggcatcagtaatgttttctttcaacaattctaatctcttcaagttcaaagttggtagcaatctatttactagataaaactagtcaatttcatatacttatccaacaccagagagaaaacaataaaatttgtctcatggacaatattattaaaggtcatttgc

SEQ ID NO: 5868 - DNA, 898 bp, Glycine max
ccagacttgcatgcctgcaggatcgaacaagttgagattaaactgatttaacaatcaatctaaaagctaaaaaataaatcatacaagtttttctcacatttttcttttttgccttttcctttcattaccaggttttgtaacttgtcatacctcttctatctatatgacatataatacactatctatcacagcatcacaaatcatcaccataaaagcattgtattcagaaagcttaccaatacaaagaaataatgatcctaaacttatgcacctctgttaaaatataaaataaatacctctcttaaaattaaaataaaatccgaagcactaagaacaccaacaaattgccccttgcagaagtcccaaagaggagccatgaaaactccctgcaaattatccagatcagaaaaattgcatatgcaaatttctaatcagcaattcacactaaaactaagaaagctaatgcatataaaggaataaggattaagaaaaagacttaaaatcattgtcaaaataactggtcaaattccatagagcaattcaaaagcacgagttcattctcacttatttaccagggtaaaggcacatttaaaatggcaccaatttgtttggcaaaaattactaaatatgcttaaaggactctggaaactttcatttcatctgagagaaaaaaaaatagctacctgctcatgcaatatatgaaatgcctgtttcactggtagatcaacatccaaagcaacaacctgtggccaggagtcactatcactattagtaattttatgattcatgtttgaggtttgtaaatttgatgtaatgtaggcaaatcataatgtcaaaataaaggggtaagggaaaactttcaaaccttgcctgactcgggaagtaattcataagccgg

SEQ ID NO: 5869 - DNA, 857 bp, Glycine max
atcaaatcccacacttcccaaagtgcacattgtcaaaagaattgtcaaagaaggaaaatagattattcaaacctgtaattttggcactctggtggcacctccaatcaactccactgcatatatttgttccaatgacaggccagaattctcaagcacctctttcacaggtaagagcgatttttcccaaatgtcttcacaaagctcttcaaatttctcacgggttattgtgctcctgtaagaaaaggagccttgtgtgaaggaatcttaagcattatatgcagtaatcataacttgataatcaagtaaaattttattttccttgtcatttttatttagattagtcaatgcatttcacttgacaagattgagcatataagggaatttcattctttagatgtatttcttgacttcccctgttcagatttcttcatcatttgaaaacagcaacttccttcagattgatctctaccataagatttaagatgctagccaatcctatctattaaccaatatgcagcgctgtctttaaggttatatgtaactcaactcctaagactgatgcccctttctcaactctcagccagccagtaaaacttaaggctccttcttgttaattaattgcaaacaactaaccacttaagaaactactagtttgacatatgaaagctaaactatttttttttaatggaaaatacagttatcaacaattcctttttctataattctcccaactattttttacccaatgaaaattctagaacatgtttttactaaagggttggagcaggtcatatcacaatttctcaagactgatgccacttaaccaactctcaggcagtcgggtcaagcaaaggcac

SEQ ID NO: 5870 - DNA, 844 bp, Glycine max
gttggcaccaaaggaattcttagctatagactaaacctggaagacttccctggcaatgctagagcttatgcatatttcgcggagattgaagatctgcctaagaatgagactagaaaattcaaattggagcaaccttacatagctgactatagcaatgcagtggtgaacatagctgagaatgccaatgggagctacactctctatgaaccaagttacatgaatgtgagtctggagtttgtgctttcgttctcctttgttaagacccgggattccactcaaggacctcttctaaatgcaatggaaattagcaaatatgtgtcaattgcttcaaagactgacaggcaagattgtaagttcttaatatcagtttatatttgggaaaattgatcttttcttgcatgtccaaaatatcttatctggaacggtaattgcatcaaagattaaatatttcaagtttgatcactaacttaaatatttcaagtttgatcactaacttacaacaattgcattgctgtactgactgaacaggttgctaactatactcttattttacagcaaattttgtaaatgcatttcgcttcttatctgctgaaagtgtcctaaagaatgaaggtgatccctgtgttccaactccctgggagtgggtaaattgtagcacaactacacctccaagaattacaaagatgtaacatctccatacctttttggtgatgtttatgttttatgctaacttctagcctagtgaattgtcattctattaatgagtctctctggcagcagtttttatacacacaagaatgtttgaattccaaaaggtggtattacagaatgccagatactggaa

SEQ ID NO: 5871 - DNA, 836 bp, Glycine max
tttctctgctaacttcttctttctttccaaggcctgctttgcctttgcaatctcctcctctcttttcatctcttttagctttgctggatcgatttcacactctttggcaggggcctccttttggggatttttaaattcatattcatcagtttctgctacatccttactctccggtttggatttcaaatccctccccttgtttttggattctttctgagcaggcaaagtttcttgtggagaaggcttaggctcctcctttggctgttttgtgaaagtttttggtaatgcttcagcttcagcaggttttggttcttccaggattggcttttcatccgggttcctcatccgtccgtcccgactcaactgtcgcatatccaatgaggccaaaattcttttttcataatcattcctaaatgctttgtccttgttccagagtgccataaatttctcaacctagaatcgaggaaatatgagattcaatcacaaacataagagtcaagaaaaagcagaaaaaagttatcagatggttaaagtgcaatatcatcattaaatattggatagttacaaagaataaaatattatgggacaaacctctgtctgtgaaacttcatcaagagcattaatatctttctttgcagccagctcccgtgctttgttcagaactgtacgactttggtagaaataggtgttctgaacaggaaacataaatgcaaattcagatattattctacagtgctaaatcatatcactggaaattcaccaaaaaaaaaatcatatcactgaaataaacaaattagtttatttatcattaagagactagagatttacatcaatga

SEQ ID NO: 5872 - DNA, 846 bp, Glycine max
ttttttttttgttgttatggactgcacgaatccggtcccggtgtcataaaaaatcatgatacacgtgtctactcgttgtgtatattttcgtggtattcaatattatacaaaatagtccaaaaccattcttcgagtcacggacaataagataattgctaacgagtatcttctgttgcaagtgcaatctcaattaatctgctattctatttatgtgtttgtcatagatagatctcatgacaacatgatagagcatactttctagggtaaatttacccttcctaatagcgtttctttgaaaggaaattgaaagttgaaagcgttggccaaaacacctagtgacaaattcggtttagtctggtcggttgattcattagcctaatcggactgatttcactattgaattgatcatgtaattgacttaggatgattcggtcacacccggccagttaggtcactggatcccagctgtactagttcgacccaatccatcttacaaaaaaaaatggattacctctacaacattattttgatgtttcattattatcaattgttattttagattttgggatgtagataaacctttcttactcaaataatgttagttatataattatatataatagatacatatacaattttgaatttttaatatatactaagtcaaatcaagccaattactgacccaccggttagaccactaatccactgatgcattgtctcaaccaaatcaatgaccgaaccaaatttcataactatgcatgggtggtggcaacgttgcctagagcatgaagctgaaaagacaaccatgtatagaatatatagtataacaaaagatatttattttaa

SEQ ID NO: 5873 - DNA, 869 bp, Glycine max
aagctaatgatgaagatggatttagagatttagtgcgacataccatgtttgaaaagggtcagagtaaacgcatatggggtgagctttacaaagtgatagattcttcagacgtggttgttcaggtagtgtctccttttattttcctgggatttttcacatgtgtatgtttttgaagtagtatgcatgtgtgtgtttctatagatatgattttgtgcaagaaattgaaaaaaaaaagagcattatgatgggcatttctgctgctatgttgctctgttttgaattttagaagaaatttgtcttggttaatgtgttcctccttttaagcaattttgtttttatggtaggtcagatttattttgacacgactccttggagttttcactaatatccttctcttcctcaaagtttgaatactttatgtatcctaatgcaggttttagatgcaagggatccacaaggtacaagatgttatcatttagagaagcatttgaaggaaaattgtaagcacaaacacatggtgcttttattgaacaaggttagtaacatcattatttgttcttgccattgctctaaaatgttgctaaatgccctaaattgctattatgtgagacaaaacaatcttaattttatttttctcctttcagtgtgatctagttcctgcttgggcaacaaaaggatggctcagagttttgtcaaaagaatttccaactctagcattccatgctaacattaacaagtctttcggaaaagaatttctgatacatttcatcttttatgcattttggttactttatctggcaattttggtacattatgaaaaaattaacctgaaatttaaaatacacaactttctttcctctccctaacta

SEQ ID NO: 5874 - DNA, 826 bp, Glycine max
gaagcctcggtaccccggggaatccctctgtagtcgacctgcaggcggtatataattaccgaataggcattctttgtcaatagattatgatgttgcttcttaaattattaattttatgtatttgaaaataaaccttgaacggttaaagaaaaaacaaacacatgcaggcatgcattttattttaatgtttgtgatatagcataacatcatcatccatataaagctaactattgcgtcaaaaataaaatatttttttaatgaaagtattatttggtgtaaataacagacataaaaggcaaaaaataaaagggcattttctaggtgcaacataagaagcaacgcacccgtattagtatatgtaccgtccatagtatcttcctcaaagttcacgcatcactaaaataaaatgaataaaaaaatgacaaaaaagaagagagagaaagagagggtgtacatggtattggtttcgaggaagtggtattatagtactagaatttacaaatgctgaggtggttggtttggttggactaagagagagagagagagagttgtatgtggtttatgtgttgtgtggggaatagccggtttttggggaaggattcattgcatactgaaatgtgcagtagcaatgcacctgtgccgtagtgttgtctgtctctggggacgacacctaattttctttttcttccttttccaaatatgactttgtttttttcgggacacatactataatacatacattcatattcattccctccaactaaactcatccattccaaacaaggctttttccttcctctcttccccttttctttttttgccctgc

SEQ ID NO: 5875 - DNA, 919 bp, Glycine max
atgtttatcgccaagcttgcatgcctgcagaatcctatgcaagctccaactttctacactaattaaattcattcaggcaaattctaagttacacgttgcgtaaaacaatcttcttaaatccaatcaccgagtgtgtcattccaggtattttaatgctaatcattgttagtgcacagatagtagaagacaataatgcgtcataaatacaaaacagaatttgatgctcaagtctgaagctcgtctagttctcttaacattaagaacatttattaccaatgaaagcaaaacagacagacaccccatatgaacatgtacatagtatggtaaaccttttcacatttttaatgtctagaataacacgttgtaatgtctctcactcctaacagttaacatgtaaactcacaatttcccaagtaaccttcttaccttcaaaactatcatcacataaatcagatctctcaagtggtcaagataatgaaaataagcaagcctccaagttctgttgaagaaaacaacactgcaaaaaccccaaaatcctgctgcaaatccaactcccataccgatataaaactctgatgttccaaagaaattaccatcaccgtgtccaacagaagctctctccctcaactcttccttgtctgtgcaattttttgttacaggaggaccacaaagctcaggatttccagtgtagctaagttcttcaaagctctgaagttgggtgctcgtgggaattctgcctgataagttgttgtatgatagattcaggacactgaggaaggacaaatcagataagctttgagggatttgaccctgaaatgttgtttagtgagagatcaagggattctaacaatttcattttttccatgtcatttgggatccctccagacagagattcttagacagttcaaaaacgcaagca

SEQ ID NO: 5876 - DNA, 870 bp, Glycine max
aatcctatgcaagctccaactttctacactaattaaattcattcaggcaaattctaagttacatgttgtgtaaaacaatcttcttgagtgtgtcatttcaggtattttaatgctaatcattgttagtgcatagatagtagaagacaataatgcgtcataaatacaaaacagaatttgatactcaagtctcaagctcgtctagttctcttaacatcaagaacatttaataccaatgaaagcaaaacagacagaacaccccatatgaacaggtacatagtatggtaaaccttttcacatttttaatggctagactaacacgttgtaatgtctctcactcctaacagttaacaggtaaactcataatttcccaagtaaccttcttaccttcaaaactattatcacataaatcagatctctcaagtggtcaagataatgaaaataagaacgcctccaagttctgttgaagaaaacaacactgcaaaaaccccaaaatcctgctgcaaatccaactcccataccaatataaaactctgatgttccaaagaaattatcatcaccgtgtccaacagaagcactctctgtcaactcttccttgtctgtgcaattttttgttacaggaggaccagaaagctcaggatttccagtgtagctaagttcttcaaagctctgaagttgggtgctcgtgggaattctgcctgataagttgttgtatgatagattcaggaaactgaggaaggacaaatcagataagctttgagggatttgacctgaaatgttgtttagtgagagatcaagggattctaacaatttcatttttcccatgtcatttggtatctcttcagacagatgattctagaacagttcaaaaac

SEQ ID NO: 5877 - DNA, 831 bp, Glycine max
cggaacccggtacatcctctaggatcgacctgcagagaaagtgctgcaacaacatggggcaaccttgatgtgaacacatgaatggttttatgctaccactgggggcatgttagaagcaacctatttaacagaaaggcgtaggaccataggaaagagagttcgtgattattttttcccatgtatgttttattctttcttgtcactcttcttgatttgataaacccaaatgatgtcttctggtttgatatctacatttttcacgcgcattctgtatttttaaggaaatagtgaacataagagtgacttgtatacgcctttgatgcaatcaatgtaacattttacagtacattgattttaagtttgttctgattgaagttaaatggcatcaatttaacatttatgaagttaatagtgctcagtttgaatgaacttcatgtcttttagaattttaaatttttgttctgattgatttatttgaattgattttaaatttgattttttagtatgcatagatattaattatattggctatgtatattttgtacttctttttcttcttttttttttgctgaagattttgtacttacttcattatcttgtttaaagtatgctaattggcataactaaagaagaagcaaaatgtcaattttaacaatgaaaactctaatcaatttaaatccaaccaaaattgaacggattcttatttggacaagaggaaaatgtaatcaaatcaatttacttttttttttataacttttcaaagaattacagaaaactattttgccagttggtagcgtattgcatcatcatagggggaaaggcttgattatt

SEQ ID NO: 5878 - DNA, 807 bp, Glycine max
tgtttctttgtgataaaggttcatccaaacatgaaggactcagagaggtaccggttatgcaaaaccattgattgtcagaaactgtctcaagaagcaagcagccatgcagcacagaatgaaagactaccggtgcagacggtggttcaagttctttacttggagcaaatgaggcttcgaaatgccatgaatggagggcacaaccaagtcttctttggtcagttccctcaccgttcaggaagcggtgcagggagtggagccatttccccaagagataactatgcatcggttagaagagagaacagagagctgaagcttgaagtagcaagaatgagaatgaggctcactgacttggagaaagaccacgtgtccatgaagcaggagcttgttaagtcacaccctgccaacaagttgttcaaatcatttaccagaaagctgagcaagctaaattctctattcaggataaacagcattaagccaattggtggcaaagctagttcagaaactcgcttcccttttccaaagcgaagacgccactccgtttcatgactacttaatatgtcatatatgccataacgtatgtacagtatgcataaacatggttgtaatgcatggcgtgatattgtgtttattttcctgtcactagttttttgagtatgttcctgacatgctgtgttcagtactattgttaccctgctgaactattccaaaattgggaactgatctgtttctaagtcatcaaactttagtatacaaacatttcatgtatcagaattcaaattgtaccatcctctgcatcagaatattagt

SEQ ID NO: 5879 - DNA, 823 bp, Glycine max
attgcatcattgtcaacatgtcaagtggttgtatgaaatttagaaacaggtgtttgttccaatgttctgtccccatttaagttttggtacgggatagatttcttagatgtttgtaactctttaccccttttgtagtacatgaaaaaacaatgtctgatgccagcaggcagctaccagaataaactccaagaagctttcaggcttctttaatgagggagggacacattctgaaaatatttttcactgatttctagtacactggaagagtaagtagatgagaggaagtaagaagctgagctgactttcaattctgttacacaaccttttttgttctgttagtagaaaattagacatggaagttaattggagtgaaaaaaaaggggggaaagaaaacatattctgttgcattagttgagtataaaattgtaagatatgattgttaggggattgaacaaaattatcaatgtgaaatttggatttcattccttggttagttttctaaaggtaatatttctaatatttgaacataacattgtcctatatctgctgatagtgtttgccactaacaattccatcattttttgctgtgttttatttggtataagatttgcaacttaagcttttaggtaagggtccaaatccaataatgttttttataacttttcctttcttataaacactgaccatgtatgacccataattcatgatttttataacttccttatactgggggatgtcaatgattaaacttcagaccacttagtcagcaatatataaacatcaattcaaggatccaattaagaaatttaaatttttgaacaag

SEQ ID NO: 5880 - DNA, 805 bp, Glycine max
atgctgcttcccacatggtgaaccactgcgcctcccatggcagtgcttgaatcattgcggcattggttgatttgatttgacttgaaagtttgattctttccctccaaacccaccaacacgttgacacgtcgctttctttggattggtgggtttttgccttcacgttttcgggttgcttgaggggcttgttgtagactacatttttttttcttttttttttttttgaagatgaagagattgaaaactgaacctcccagttcgaggaggtttaggttgtctcatttcttgtttggtgttggggtgttatacttggtttttatatcgtgtaatttttcacagtttacgaaagttgtgtcatcgttaagtggggatgagagttacgatggaattggattggataaggtagcaactattgaggatactgaagatgcagatttgagcaaaccctttgtaagttctgtttataaagatgcatttcattggaggttagtggatgatagggaccaagatgctcccttgaggccaaaggaggaaccaatgaaggaagaagatcatggcactgaatctgtgaagcagattttggatgcatatggtaggattacaggggaaatcttgcggcaaaggaaccggaccggtgatttgtcagtgctggagagaatggcagatgaggcttggacattggggttgaaggcttggaaagaattggagcaggttggtgacaagggggcttggagaaagctctataattgaaggaaggaccaagtcttgtccttcttggatatcgatgaacagggcagatttgtta

SEQ ID NO: 5881 - DNA, 815 bp, Glycine max
aataagggatgcatcatatgcatgtgacagtgtttgcagtactcagcagaaaggcagcatcttcaactcaatgcagtaaaaaataaaatatcaaattcgtaccttgttgattcccgcccccccacccccccttccaagcaataataatggacagttataatgagtttgttaaccctacccagcttcctctaaacaatgctactaatttattaattaatgtgtctatgtagcatgtctctctataaaattataaaattaattaattactccatatgatgacacaggtgatagtgcagcaccaagcaacaaattaatcatatcccataccataaaaaaacgatctgattgttaataagaatctaacctatctaaattaaacaccttcatatatatagaaaatgtagtggaatacgtaccattgttaaagtatacgtattgaaccctaacatgatcatcctcagcaaaaaaatcacaccacaaactgaactcaataagcaatcaaacttgcgcttcttgcatgtttttgcaaatggacataacatatataattacgtatttaatatatttatatatatatatatatatatatatatatatatatatatatatatatatatatatattatagaaaccactaattagttgtagaactaatagtagtaatagtagcactagtaataatatactagtaattaaaagaaaaattaagaagctagcatcagatcatacacttgtgattatttttaccctcagaaatgttgaccggaggaatcacgtccatcgtctccgccgtgaggttgccccgcgctggccgg

SEQ ID NO: 5882 - DNA, 880 bp, Glycine max
  misc_feature (867)..(867): n is a, c, g, or t
agaatttttatttttccaatccattgaagaacaccaacaattgaaagattatactttcatctccctggagaacaatctattctatttggtgattttgagaatatggattcattgttttctaagccaactgttaagtaacaaactgtatagtgacactagaaatcttacacacatagtttgtctcaaaatttgtttacgcaccttccaaaaagatgctgacaaccaagaaaacaaggttccacgatgagctcttttatttgaggatgatgctctctattgccaagggaccttttagctttgaggatactaaaactattgttggaacactttatctacttttcgagatgcatgctttgcaatgagatttttgcataaagataaagaatacattgatgttgtcaaagaagctagcaattggggatcaagctattatttaaggaagctaattgttacaatgcttatctctattaacataaataggaccgagcatgtgtgggagcaaaacatgagagtatttagtatttagtggatgatattttgcatgagcagagacaactctctaacatacattgtgattattatttatttgtttgtataaatatgtcacttcacaaaataaatattctattgaaacccatgtcatatccaaccagatttgttacacctaccattggaaacaaaattgatatgggcagaaagagattgtaacaaagatcaattgaacactgagtttgaatctttgtttgcttctttaaatgataatgctacaccatttttattaaatacatattttatttaaaacatcttatttaatattttatttcttttaaaaaacttatttttttacattgatttgactgatgctgntggaacattatag

SEQ ID NO: 5883 - DNA, 851 bp, Glycine max
tcggaacccggggttttttgtagagtcgacctgcagataaaggagacgttaggtgttgtagacatcatattataaaagagaatgcattaggtatagtaaactacatgggacatgtgatgtgaagaggacatatggtggacaacatttcagaaataaaaatagaagagtgacaaaatatacctatatatataatgcaaaaaaataactagatgtaaatttactacatatcaaccagtgtacaaaactagacaaaactcacagcttctctaaatctattcataagattcaaagatagaaaaaacctattacaaagaatctactggttccctgtcatattcaacacaaatagctcaagacaacactcattagaatttgatgatttctgctacaagaagcataaatatagcaagacctagttaatcctttgagaacttaatacaataaacatgagctaatgaactcctaagataataataggtaaaatttaagagctacctggtcaagtcgatcagcaacatttgctctatcaacaataaccatggaatgacccataccacaagcaacactgttagaaaataagaaaatatttagaacattactcattttgctttttcgtacagatagcaatcttaattgtataaaaaagatatcacataatttataagcaacttttgtttattaataatattcattgtatcaaagcataacttcttaactgatgccaaattttgctaccaaaaacaaattgagactgaagaaaaccactcgacagttgacattcaaaggggaaaacagaatatgcagcatcaacaaaaggcaggcacagataaaatgggaaaaaagggggaggg

SEQ ID NO: 5884 - DNA, 836 bp, Glycine max
ttgtccttggcgaagagaggttccatgggatagccagcttgtcatttggtattactttgacaaaacctgcattgatgtttaacaaaaaagccattctttcactgtttacaggtttggtttctcttagttaagctcatactcccttcaccgaaacaagctgtattttgatactctttcattatctgtgattattggttgctccaacttactgttcagttgttacaggtgatgcaaaaggtgcacatgatttgcaaacttacctgctatcaagagatcatttgaagttgaagtctgaatttcaagatggaaatggaaaggtttgattgagctatagtgtcttgtctttgttttagtttttggtggaaatatgcacattcattttatctcctgttgcagaaaattgtcgattcaattgaacagctacctgctgtggaagtggttcttggtgagcatatcttttttactgtgggggaccattaccttgctgcaaaatctgactgattttccaagagttcctttttgatcttttatctagtttgtatgctatctatttgcaagattaggaacacagaatatacccaggcatgcctaattgtaaggtttgagcaattgacaatcattattctttctttttttttttctgtatagaggatctcacgtcttatttagaagataaaaacaagtgtcttgatgtaatccttgagaattcaaagtcaattatttttgttacccttaattccttctattgggttatttttaacatttgtaagatttctcagttcgatagtaaaaggagtgctccttggtagcattatttagctcatgctgtactgtta

SEQ ID NO: 5885 - DNA, 859 bp, Glycine max
agttataccttatagcctttaaaacttgggatccggattccccaatccctccattcacctttcaacacattcacccacattcagcaatttaaaactgtttgatgaaagatcagacaactcttattttatcgcgtctgatcaaattcaattgtcctatcttcatccaacggttataaatgcgctgaaggcacgtgaatgagagtgcaaagtggagaagctacacatgggtaggagttgtgtttggtggtgttggtgctgaggccacacgcttacctctctctgaacggctattctcagcaaacttgagactattctggtgcaaccctttttgcttctcttcctcgtttcactcagcggtgtaatagtattcctcagtggacatgttgatatcctttgaaggagggaggaacatgctaccccactgagggaagtgaacaagagtcacaggaagagtgcaacacacaatcatgatacccataagggagagaccagtggaagtagaaaactttgaggttgagaagaagaccaattgggtcaaaccagacccaaagtttccacctgcaccagttaggcctgatatgatcccaagagaacgtcttgagatgaagggaatgatgccagaagttgcaccacatgcagcttgagcaccaatagagaagaggatcatgggcaagactgcaatgggaagggaattggcacgtccaagccatatgcagaaagcccctcctaaggtttgggaggatccataggttccaaagcctgcccctcatgccaaacaccttgctgcacatcagaagtccatccaccaaaggggcgagcagggatatatatttgccattccaaatgaagcagcatgatt

SEQ ID NO: 5886 - DNA, 855 bp, Glycine max
gccaagcttgccatgcctgcagattaagattagtatgcacttattgttcttacttttgtttttcaagcctgaaatattgcaaacagatgatgaaggaatttgtgaggatatcacttggttagaggagcattgccaaggacaggtatcaactgatgctgaaaccaagctataatgttctgacttctaatcgtctaaattttctttccccaatgttctttttttccatctgttatgtaacttctctgaaaatttacatgttgctttccaagtattaaagatacagatcaggttaagatcctgatatctgatttatagatataatatagaacctaatgaagttgtttttgatcttacataattcgccttttgattttattttcatatatattgtagatctccaacaggaaatgcttgctagatcggttattgaaatcggcttcagtgacaaaagaacttcaagaaaagtaaatgtctaccatttattccctgattatttacttaattttaacttatgtggctcataggtcttattggaaattcaatatcttgattaacagggattttgaacaaaatgctcttgacaaacttgtgatgatggcttatgagaaatacatggtaaccttctcattgttcagtatcactttttgcatataatcaggtttacagttttggaataaattttttgtattctagtcaactatctccaagagcaagagttttgttacactgttaccatagttgaaaaggctggagatctttatacaacagtactggacaggacagtatttatagaagttgagccatggtctataaatttgatttatcccaggttaaaaagggaggaagtaggtagga

SEQ ID NO: 5887 - DNA, 808 bp, Glycine max
actcaactagttagtattagtttctaacagttattggcagctgttagtttagttagtggcagttatatgactgctgggttaatgataataattcctctgacagatctgtctataaatacctttgtaatctttagacactgggttaatgataataattccactccttactttctctctattcttggtttagaaattttatgatggtatctatagcttagttcagtcatcaatggcagcagaaacaaattctgttccctcctcttccgctttccaaattttttatccgatcttgaaggtccagaccaaatctaccttggtaatggacaaggtctatccatcaactctactggttctacttttatctctcctactaatcctagaatgtctctgtttttaagtcagcctttacatgtgccttctataacaaaaaatcttattattgtcagtaaatttgcactagataattgtgtcttttttgagttccatctgaaccattgtcttgtaaaatcacaggtatccaatgagatcctacttcaaggctcactcttggtcctgatggtttgtatgtctttgcaaatctgcaacttcaaagctcagctgctgtttcagcttcttgctttatttctaacactaaatgatttcaattctgatgtaaatactgtttctactgcaagtacttgtacttgcacaggttctaaaactctttgacaccttagattggcccatcctagttctaatgtcttgaaacttgttcttaatcactttcatttcttactttctctctattcctagtttataaactttatga

SEQ ID NO: 5888 - DNA, 708 bp, Glycine max
gctgcattggcatcttgggaccattttttttttctttaccactactttttcactggttccattgttgtattgtactcttccttgtgctagatctgaagctggaaccttccccttctggttctagtatatgccctgcttgatttggttgctcttaacccttttcagaaatcaaaaacacttgcaagttccattctttcagttttattattattattattattattattattattattattattatcaggttttagtctatatttgctgttgtgatctgctgctgattctgttatgtagatgctcctcatgtctgattctgcttcatgtattcgtggccataaagacatttgcgctgaaattaacaatctttttgggctttttgcttttgggaagtgtttggaagatcttgtaaaattgagggggagcaaagtgattcggctcaaagtgcccttgtcatttcaagttatcatatctcacataaagtttgttatgattttctttttgctataatttgacaacctttttccagtaaagtaagagagagagagagagagagagagagagagagagagagagagagagagagatgttcactgattactaagattgataggtgaagttaaattgaatactaaatttgtctaacatgtatgcaagcctgcggagtctgtatcaatatgtaagatgtttgtttttccgcgttaaaaa

SEQ ID NO: 5889 - DNA, 831 bp, Glycine max
ctagttttgacattttttcccccagactcttgtgctttgtataagataaacagggtgaacttgtttttgtttttttaacaatgaatgcatcctttaaagtttctgtaagatatacatcacttttattaaacctttcatttttgttgtagttcaaatactctgtttttttagctaatacactgtatttacataaactatttgtgtttagttggtcttgccttgactactgatacttattagaaggcaaatataggagtcactcacttttgtgcctgattgtgcacatagttggttatctttttcaagtgcaggaaaagaatagaaatgctaacatttgctgagtgatctttgtaaatcttgccaggtaagtctgttgcttgagtcatcctacttccaatcactcctctttttaagtcatatctgaactcttgctgctatgcatgataagctagagctagagtgaggaaccatcatccatctaatttaaatgtcagctatgtcattttttctcccttgtgtatgtacactacttcctttttccctcatatattttcttgtgtcaatgaagagaggcatcctatgagcttggtttcaagtgattgaacttattggggctcatggtatttgttatggttaaggagtatatgagtggcaactgtttagtattttacaggctagtttctgccaatttatggtgaattcccaagccttgatgatctgaagcatatatttcctcctctccttcagaaataattgccagtggcgattctcctcatttggccaaattgtattggggctggtagtcatgcttctctttttgtgcatgcctgt

SEQ ID NO: 5890 - DNA, 858 bp, Glycine max
  misc_feature (835)..(835): n is a, c, g, or t
ataatgatagcttttttctctgaacatcataccctgtgaaaaatttgagatgggaggaattattctcagtaattttccaaatttgtggtcttttactctcagttagatcagtctaagggcaaatatgaggctatcttcaaccgtttttttgacatgttctgttacaacatcctaaaattggaatattacttaaaccagtttttgatgaaaatcttgataactgtttctttaatacttcacggcaaaaacagtagaacaacataatattgaatgctatttttgtatgtcgtcttacttgatattttgttttctggctgggggttctttctacttagttcaaataaagcaatgttttgaagtcaattcatttgcataagtttccatacattcttaactgaacctcaataaaacttttcactcagtattaaagaatacagaatatgaaaccaagttggcaggccactatgctttagtatttgattaaaactgattcttggttatgcaatcttttttagttagactcgctgcttcagcaacagcattgcttcacaaactacaaaaaggtataccaccgtgggttcctctgaagggattcgaaaagaagacttataagcaacttcaagaagaggctatagaaagcaagagacgtgatttagcagtattggaagctaatgatggtctttggcctggagctaaaattccaagtcatgccctatttctttgggctagtggctctgaattgaccactatattggaacaggatcacatgcccaacaaatacattcccaaatatcttaagtatgtactcactgggactattactagaattagcagnggaattgtgattgctttactata

SEQ ID NO: 5891 - DNA, 854 bp, Glycine max
tataacatcatccatcatgacaatttgatagaatgaataaaaaaaagaggagaaaatatcacatttgttctccttcaagagtaacaaaccttattgaagagaatgtccttattatttatgtgcatgatgccatcctttaatgtgcatttccacctgctcttggtacgtgccacctgaatttgtagcaagagaaaccctattagagccacgatatttatccaaccctgaaccacgacctacatcatattactatatcacttgacatctagttcacagaaagtggaggaaggttgttaccttatcaaactgggccaaaacaagatgatgtgtattttgatcgtctccttgttccatgtcatctaaatcatcatcatcctcttcatttaatggaggttcatcatcatcatcatcatcaaaatcattacctacttcattctgagccaagagagcaggagtgcttgctggtacttctaataattaataaagaaagaagattcagcaattgtgatggataaaatatataataagccaccaaaaatcttcaaaatataattaatatattcacattctcaatttaccaggaggagctggtgtattagaaatgttgtagtcttcactgaacacttctccataattgtatatctgccacaagatgaaataaacccagtaagatgatgggatgcaaaacatggtggggggaaagtgtcaaatggagcataatgcaattaaaactaaaaaactagcaacaccatagttaactagaattttacagtccaattttcttctctttttggctaaatgttagaccatccagtcaattggagttaaggaatacgagaagtcgcatcaagttt

SEQ ID NO: 5892 - DNA, 816 bp, Glycine max
atcctctcagttacacttacacattatacatcagaacatatattttggtatcaacagttcattcttggtataacataaacaggtcctaagtcaatctcttaatagcaaataatgttctttctagtattaggataagttgattgttagtttatttaagtactattggaaatagtagaattatgctaagtagtctttacatattaaaaaaataaaatcttcagattggtctctaaattttccaacatacctcaattctggactgaagtgatgaatattaaatatttcaaggattaccttaataattttattattttagagataatagtattttgaggactaaattggtaatttattcaatttttcgattaagttgtcagaataagtttacaatttattcatcggattatcaagacccactctcggtcttaattagacagtttcctctaattttgtcataaaaaaataaggtaaggtacatgttagatgtcatgattttaattaaaggcgtagatacagtaaattttttcatcccttacattttgtttgaaactaatgtttcgctaaatttgtcccttcaaatacaatgaagagaatgataatctattcaattacctatgatgatagtctccaattgttatttgccaagacagggtcaaggccttgggaatccaggctcatgaaaaggtcaagtttgcatactcaattaacatacggagactggtaaatgtgagcatatccttaaaataacgctacaatttttaacattaatctcaaattttcttcttcaaatgtgagcatatgattggagaacataaa

SEQ ID NO: 5893 - DNA, 822 bp, Glycine max
tgtcgtgtagtaatgagttgttacttgttagaattagattgccacactttgaagtgaggcgatttgattgaattggaagttaatgcctttttgttcaaacaaaatcattggttctctctttgtgtatatatgcttatttaagtttcaaatttgatgattcttgagtttgatttagcttgtcttttggtgaagttggattccttttacccttctctgggttctgttaatgatttagatttgactctgcttcatcgcaaccattgtgatttggtagtgaattttttctatgtgggctagttctttttctctccccttgcttccatgatagattattatagttgccattctcatcctgaagttatgaagtgtggttgttgttgtctcatggcatacaaagagagagtacattatgagtacctcttttgttttgaaatcatgatgcacagtctataatgtttttgaattatttcagaattgctgttctgatgttgttgatttgatgctggaatggaactatgtttttgttagtgaatctagtaactccccatcccattcctctttctcttgcataatatgacacatctctttatttctatagttaggctttgtttggataaatttatctataagtacttataggaaaaggattgagctccttccattaattaaaattaaatttttgcctttaacttttatagaagctctttcatctaattttttggaaagttaaatcatctaatttctcggaaagttaaagtgtataagttgattttattgtaagaaagaagctcaattcatttatcttattttattttcgggtag

SEQ ID NO: 5894 - DNA, 836 bp, Glycine max
atgtgtagatgaattggaatctgtgctttcaaagcatggcagtcttaggaggctgtatttctaccaccaacacctcacagctgttagtgtccatattccatcccacctaattcatttcttcaatttctctagaattatgcctagtttatatgctattactttaaccttagggtatgaaatttgaaatttactagtcactttagtttattttccattttaacccacactatgttcctattcctatataaggtttttagaaacaccatgtttggtccagaagggcgtcctcaacattgttgtgcatggcttgggatcgctagtagttttccagagtgtgcatcttcaattgtcccagaagaggtaaaaataaatccttgccagcagtttatactagtcaagtattgaccaaaattagtaaaacactaactgcacattttgatggaggcatggagatacattatgcttctttttttatggtgttagtttgttgctttgttttgcttacatgaagacttgatctgcaaattttcaggatgtttactgcaacgcaatcttccatttttgttaataattttgttgaatgaagatgaagaaacttgctattacaaaaatatagagttaatagtacttatgtatctgttaaaattctataaggcttcatacaacttacctagatttttttttaagttaatttcaatttcaatgagaaggaattctcaaatggtttgtttaaagttacatagtcatttgtggggttctgatgtcactgcaaatccaaacttctcttattacataactgggcaaaactcaagtataaataatggcatttacctttg

SEQ ID NO: 5895 - DNA, 866 bp, Glycine max
acgatgagggacagataattaaacctcactgtgcagggtgtggaaatcatattttgcatgcatgagacaatttgttatgacttttctttcgtatttacaaattttcttaaactgattgtgccattctttttctaaaaacgattatctaggtgcaacttggtatcggacttgaacatagcttaatggcctttatgtataaacaatatatgataacaaaaaaattaaacgaaaaaataaacaacttccagctacgcaccgaaagattgtaatctggaactttcaatagcataaattattgcgttatccgtaagatggacgattgcgttcaatttatgtactaaaaatctaaaattgattaagcaatgatactatgattgaaaattagcgatacgacgtcatcatatttataatggaaaagttacccttttctattagttgtcatcacttaactacagaatcactattttttcttttggtaacgaattgacctcctcctcagcggatttcatctacataatttttttttaaccactacttaagagatttgtaaattactacaccatttttggtaatgcaatattactactcgttgttcatttggatatttttaaatttcaaactaatacagaaaatattctaagacaatacgattgattaggttaactttgaagatgaagaagaaatttacttcagtctcagtgatgcaacattatcataaacatgatgtcaaaggtcatatgcatacaacattatatttaagggatgaagagaaattattatggttttggttgggtttctacataaaaacttttattagataaatattaaaaagaacagagatcatttgagatgaaaagagacacata

SEQ ID NO: 5896 - DNA, 864 bp, Glycine max
tacctacgcgcagcttgctgcctgcaggtctggtggaaaacatatcacgtgtcatttctggtcagccgcctcttaagattcccatccctggcgagaggacaagctcttggcttcttactacatatcttgataaggacttgcgaatatcaaggggggatggtggtctttttgttcttgccagagaaggaaagtaaattatactcctttcttcttcccccatcccatccccgtcccgagaataatgtgaatggcttgttcaaaatctctccatttttttttgtattttcttcttctcaagttgatgtaaaggagtgacggggttatgttttcaggctgtaattctacaagatataaattgtcggaagaatagtgtcaaccccttatttacttccgtgaaatattgatttggggaaggaatatgaaattttatgaagttacttttgagattgagactcttgtctcagcatgggaactagatttaaatgatatgcaaaaaggggttttgttgtttctacataacttgctgttctacatgctttggagtttattgttaattgattggtcattcttcaaaagattttttggggtgcatatcaagggcgttctctaactaccgtattttacaacagaagattaattcctttcaaaagaaggaaatcaaaaacaccacggaagtgagtatctttctcaatctgttaggaaatcaactataattaatatgtataagaaactaatttctttattaattggggttgagtttgcttacttaaaaaagataatgggtgaattagaaaacaatattttttttatttaaatttgaaatattaaaatttaaagggaattataaaggcgggggaattttat

SEQ ID NO: 5897 - DNA, 861 bp, Glycine max
ggaggccgagatagcaggtttcaagctagataaatatcttgtgtcagttagataaatgaaaaactatagactttaagaatcctgcaagtgttgtttttgcttcaattctaaatccctctttctaatgtaatggctgggcttacttttgtacattgacaaacataatgaattctttttacattggggttaataatttggaatgtttaatacagttgaatttactggtttagtctgcttttttattttttatttttttttatcgatgtgtaattccttaatttagttactgcatttcgcgttgtaacttgtaatgccttctgagtttgaatctgagttatgagcagaggatagtttaatctaatgagaaagggttaaaactttaagtgatcaattcttgcttggtagcccattattgcagagattctttgatgaatatcacctataactcccccaaattgttatgtctgctttccacgttttttttttcttataatagttgacgccacctctgattaagattactgtttgaatagaggttcaatttcagatacgcgtagatattaacattaaagcccattttgataattacacaccaaaaaccaattttaattagttttcaaacattttctatgaaaaatcagttttctaatacaaaaagaaaatcatgttactttaaaatcacagttacttaaaattaattctataaaattacgtttatccaaaatcaattccacaaacaccccgtctaaacatgtacttagaagaaatttgaatcttaattcacttttgtagctattatccccatttattacactcaacccattagtaaagaaatctccttttaatcatctacttctgcat

SEQ ID NO: 5898 - DNA, 801 bp, Glycine max
tttacctttatactttgcctcccctcaacatgttttttcttgccttttaagcccccaccaagtagttccttcatttccaccaacaccatggagtttgaccttgagaacccatttgaaaatcttcactctgatgctgtctcttacctcttcctcattgaatctgaccacaccccatcacagaatcactctcaaactcttaaagccagagatcttgacatctctgtcagaagagaactcatttccttaatctcacaggtatgtgccaaaaacgtttattataatgtctgataaaaaaaatgttttttttttctttctcttaaacatagtaatctcagtgtgcattggttggttttgttcagttgtcctgtgctctggatccggttttgtcttaccttgctatcaactatctggatcggttcctagccaaccaagggattttggtaaagattccaaatgtgctagcttttttagattgtttgtttattttcttcattgatcttcaattatattgattcatattctttttttttaagattaacaaatatagagtagtatctatatctattggattctcctatcataagatatgactcaaatttggtttatgtaaatgtatcagcaaccaaagccatgggctcttaggctcattgctgtctcttgcatttctcttgcagtgaagatgatgagaactgaataccctttcactgatgtccaggtgacttatgcattaaagtgatgttttgatacataagacggttttggtaaggaaaaaaaatggtaatttgatatgtatcattgaag

SEQ ID NO: 5899 - DNA, 852 bp, Glycine max
caagcttgcatgcctgcagagtgatttccaactacaataatgcgtgagaaaaatccgagcagaggaatggatcccttatcgtgcgtcctcatttgtccatgaccttggaccacccatgtcggtgtccccgtctcacgatcaacaggaaaaaaacccgatattgcatatttcaattttttaattgtttgttaaattcattttttttgcacaatttttactttgtttatgattgttttgtttgaacaagttttatagtttatatatatatatatatatatgaatctaatgggactagttttacatccctaattagtcaaagaaatgttcaaaattgttttaggatgatcattttcgctcactttaaaaacatgaaggattgaattttttgaaagataaagaattgtagtaaatataattggaaaacataaaagaacaaaagtttatattagtctatatattatttagaaattcggtcctattttcttgaaacttattttgttttatgacagttgtttacttgtcatgtaaaatagattctcaatttcatcggttggcattatcattaatggtaatggtttataatttatgttttttcataatattaagaactaaaatcgtgattcactcttgatttgctctgaatattctcaagttttttttctttatggactaaacctaataactaaaatggatcgtagatattattttttaaaaaagttgggtcctattttgcattaaaatctttcgaagagaaaagcctttagggacaataattattggtacttcaattcaacccagaaattattctcattgtagaggaatattttggtggttttaaacaccacaaaaaag

SEQ ID NO: 5900 - DNA, 805 bp, Glycine max
gatggctcgcttccacctctggcatgatacctccctagcccatctacctctgaagtttggggccattctgactgcgtatgccagtacttcctttgtaaaccgacgatttaggtactgtttgttttgcgattttggacactgtgcagttcatttttgacgtgttttgcgttgctgcaaagaattttccagtcgcctatgctacggctgcctctttttagtgtgttttctaaggccacggccttcatcttgccgctcatattctggcaaagaactttctggttgcctattctgtctctgtccccttttgcccacggctacctgccatgtgggactcttaacacatccctctatctaggggtgactacaattagttgactttttccaacaagaggaaacaaaatatcctctatttatatgcaattattgtaactatcctatacaattatcacagtgataattatggtacttagaaaattacccatgtttaattattggaacttggaagtgcatacttatctctgatggagcactgaatgttgagagtgagactgagtaaggcatggatcagttgttgggctccaaacaggacaagcccaagatttggaaggtctatacatgtaggaaagtgaagtgggtagagagtgagttagttagaagctgacctggcaggttgttgtgcccacagcgtgttatagggtgtgtgaaagatagtggaaggcagttagtcagtttctgggtaatttggacagagaatttgttctgagaagccccagctctggtgttttgcctcttgtagagatcaggc

SEQ ID NO: 5901 - DNA, 864 bp, Glycine max
gaatagttgttcaaattatccaattccgtaagatcttgagctaacttggctacaagagtagtttcattagtggtatttataccgtgatttccgacaaatttgtaaccgatgatagtgttaaatttttagtaaacattttcttctaattatttttaccattaatttctttccttatgttttataacaatacaaaaagaagtcacaggtcagtgaataatagatgatatgtaatagcgaaaaaaaccagttgtctccaaatgcaacacattgtctgactcactgataaatgtttggtttagtctgtatttaacactactagcgtttagaactttcaaaatcgcaagctagagaagcaacaagttttcgatacaacgtttttcttattgtcctcggtgctggctcgtggtgtgggaaatatattgaatgcatttccataatgcctacaaggacaaattagtatgcaaattactaagctcagctattatgcgccctttcttgagcgtcctgagggcgtagattcgtcgtagtaaacacaagattgcacaaaaaatatatttctcgttaaccagatcataaaacagaacagaagtcttaaacttgattgtttatagtgataattgctttatttttgtctccatatatgtaaattgttactatttacaatgactagttaaggagatctaacttagttaattgaacatgatgagtgaattattataagaattcctgacactctcttcaattcctacataaaaaaaaaatactaccaatgacttttctggttattaatttattggggggggaagttgggaaccaatctgtatagatgctcctcttttcagtatatcctttgatcacaggttt

SEQ ID NO: 5902 - DNA, 846 bp, Glycine max
agcttgccatggctctgcagtaaaagtaggggaaattattatgtccaagtacagcaatgacctttgggacaaccaacagaagtaagtatggagtaaggaaaatcgaggccatctcctcaagtaacatcatcccactatactgcaccaccaaaaaaatattagcataagtagaagaattcaaacctatgctacaacgaaaaaaatgaagaacacacaagggttggtctactttaatgcaaatgtgttaaccaacacctgaaagagtacctggaataaggtttcaaactcaatccggaccatttcagtactttctttgccccgccatctcttgggcatataatgcgtatgctcaactaccattgacattgctccttcggggtctatgactagaagctcatctgcaattgcagtccgtctaatagcagttatagttccaaaaacagcagcataccagaacaagttccgaccaaatatctggattgatattttgtttttcaaaaaaaaaaaaaaaagacgctattattactgaatgtcatgacatgtatttataacttgtttcagcaaaagaatggaaaaaccattacatgaccctccagcagagactcctctataaaagcaatgatgatcagaattgcagcaaagccacccgatacaaatgatatgaatttttgaaatgatagatatgataggtgaagggaaattgcttgatatagttagaaagcatgtaatacactgctattaaatccggtgcctgaagagaatgatccacctataacacaagttattcgttagcatgaagtatgctaaaaacaataaatccttataccactttcaaacagtaatagc

SEQ ID NO: 5903 - DNA, 754 bp, Glycine max
gatcggcttcggcatcgatggcggcgattttccggtagaggacgcggatgcggtgggcgcggtaggcggattggatggaaacggcggcgctggacggggaattggttggttgttgtggagtgtggccatggtggtaggggtatgtgacggtggtggaagagggtttcatgggaaaaggggagtttgatagtcacacattggattggacagtgagtgagaaaagagtgaaaataagggaatgaagttgaaatatgttggcgcgtaggtgttgtggaaatgagatggatgataaccttttggttgatgcgggaccccacttgcttttctccaaccttcctcggctcccactactcttctctttcatgtttaaattcaaatcctctgataacttttcgtccatggatggatggataccacatgatcgtattatctccataagcaaatcattattattagatatttaagtgtcattttttactattatgtgtcggccttatcttattttcatatattcaatttttaaaattttattttagtatttatatttttttatgtttttcaaaagttttattttgacaggattcattttgattttttatattttcaaaagttttattttgatttttttttaatttctgaaataattaatttaaaataataacaactaaaaccatcattttctttataacatttgaatacctactttcctaatcttcattctctttttatgcaaactccatgatcaccaccacaa

SEQ ID NO: 5904 - DNA, 811 bp, Glycine max
aacacaagaggaagttgcttataccaaagaggaaactgcccacaacaccctacaggatgactgtaggcgcataaatcacacagagggaaacaatttgaatggtggagtgaaagcagttgatggtcaggcctttatcggggaagaagagagatatgccatgcagtctccctctccctcgttattggggcagatcccacaacaaaatgggccagcttgcattaagggcccaatagcggttcaaggagggtgcaataaggaaaataattacccagctgaattcttggggatgaatgaagtgcagaatcaaaagggggtgggctaagtaatgtcttaggcccaatgacgaaaactgatgggtgtcataaggaggaacccagacctgcaacccaacccacaaaagagaacctagacccccaactactcagatcattgccctatcatgttgaagtctaaaattattgactagggccctaagccttttagggtttttaatgcttggttgcacaataaggaattcaataaggtggtgaatgattattggtctgctaaccagcctatgggatgggggggatatgccttgaaatgcaaacttcagaaaattaaacaaaggttgaaaatctggagcaaagaaaattgtggagatcagggcaacaaggtgaagttaatccagcataagctgaatgatttggagaactccttcacagctcaacctactaatcagcaggtccaagagcttaaggaagcccaatctgaactatggggagcaatctattcttcatgaatcaatgctgcgacagaaatccaggtgtaa

SEQ ID NO: 5905 - DNA, 880 bp, Glycine max
ctctagagtcgacccctgcagctctcttaggaaactgaaaaaaaaaaaagtgattatttctccaatataagctaatctaaacacatattctttggattaaatatccttaattcttttcattcatatgaatcagttgcaagtatggtgtcacttgccgctacaatcatcctgacaggaatggtatgtataatatattgatattgattgttcttacattttcctgtttcctaaacaattattttgcattatcattctttgatgcagcaatcaatccacccattgctggattaggcgcctctatttttccatcctcggctgctaatctgaatatcggacttcttaatccagctgtttctgtctatcaagcttttgaaccaaggctgtcaaatccaatggtaatgtagaagttgttactgtacttattctcatagaggattgactgatgcaaattgcaaataatgttatccaactcttgatcctcattattgtggggtaagggatgcttctggttatgttttttggttgtgttgtatgtttctggttatcaaccaaatcaacacaattgtcttaaaggcacatgcatatattgattaatgaatggaagtatagtttagatacatatagatttcacaaatgcaataaagatggcttggacataacctatatactcttgtatacagtcaaacctggaatatagagctgttgcatgatagatttgaatggataagtattggtttttttaagttgaaacatggcaaaaataatatatttcttacaggagaataataattgtgtgatgtagttgtgcacatctttcattctcaatgaatattaagtagttaaatgtggtcatttgtggggtgatactatcaactttttt

SEQ ID NO: 5906 - DNA, 809 bp, Glycine max
tgttggccttgttgatattcccagccatatccgtttctggggaattgattctggaataagacacaggttggtggtctatcattatttgcaataatttctcgcatacatctttttctgctttgtggcaattagtttgggtttcctgtaagtaataattccactttcgaagaaaatcaaaagctgcaatcaatgttagactgtaatctataaaaaaattaaaaacgtagcttttgaactcttactctatgaacatgttcccttgatttaacaaatcaatataattttaatatctacagctttagacccagaatatctttcaatttgaagcttataaatttataattagacccctgttcatagatacaataaaattattaatgaaccacctagcagcctaagctttcaggatgagttggttgtttatggagcctaataacattgacaaattcaataggacccatgggctacagctcatatccagcaaattaaggaattaacctaaaatcaggggtctaattacttattaaaattattatctttattttgtacacttcatcactagaagatcttgaatcacaattttatgcaaaagttttatagattttgaatcacaattttatgcttaagttttgtttcacattgattacagtctaacttatggtatttgtataatataattaaagtatgtgctcaacttgtaaatcatgttagggggtgtttcattttttatctgtttctgggggttttggaactctcacgaaagtgggtcagtttagaatatagaataattatggagctgtaacctaact

SEQ ID NO: 5907 - DNA, 848 bp, Glycine max
tgattcatgtttcaggcagaaaacaaccctaattttgtaatgaaaaatgcgaaattgcacgaaacaacacaaaaagggatactgaaatctgattggttatttaattatcacttaaaccaaccatgaatggttttaagggtcctgatttgtcaaatgactgattcttgcattttgaatccatttttatcgtaatatatggcatctaaaaaaaatattattttagtatattaaaatttaaagtaatttatttatatttaataaaacattaaaatttatagacatatactatcttcaaattaaagaggctacttttcgggtgatttacccaaaccaattacaaaagagatgtctgaaattttaatgttttattaaatattcaatataaataaattgctttaaattttgatataataaaatatttttttaataatattattttaacttatcatgtattttgtaagcatataacaaagtttcatgtataaagcaattttgctaaccattgttacaaagacattaaagagtaaaaattgaaatgattttcttaaaacacttattataaatttcctatctataaatttgtctcacgcatcataagtcaaaggattgtctattaccctttatgtctaaacgcataataaatcattaaatatttcattttaacggcataacaagaaaaaaaaattcaatatatccatggtatcataaccatgcaaacatataactcaaaccatttttaccaaataatttacttctgatttttattattgacatctctatcttgttagatgtaggcacaaatacccactatgtaaactagcaaaataaagtcattaaacaccttatgc

SEQ ID NO: 5908 - DNA, 812 bp, Glycine max
tctgcgaaaaggtcttacgaaagttggatttccgcaagcagcggcggggaggagctgaatttccggcagcgatcgaattcccccggaggacagagtgttgaaccgacctcaccttcttcttcgaatgtttctctcaggaagaagatggtctgcacgagttttttgtttctatttcgagtttttcttttttagagttaagttctgaggtgtgtgttattatgttgcagaaagagatagaacctgtttctaagacatccaaatcgtcttcatcagacatcgagattgagatagctgagcttttgtacggcttgaagacttcgaagaaccacgagtcttctataaagcttgaagcaagcgtcagtccctctgatgatgctggtgggtttcaatatcagttgattttctcttttacgtgcttgttcttcttttcttttcttttttgacttttttcattggcacttttattacagagaagaagaaaatggaagacaacaacaattcttccaccctgttttcaaataattcaactgaagagttaagcaggattcagattgagcaacctgctgatgtggattatcatgttggtccatcaatagaggcaccaaaagagaacattggggatgcttcagcagatggaagatcggtttcccctactagggaatcgccatcatgctccgagttggatactgagaaaccatattcagcttcaaacagagtgtgagcaccaatgaatgaaagtttttttgctttgtcggctaaacttattttgatatctgatcaatatcccaatttcgttatggttccatttatta

SEQ ID NO: 5909 - DNA, 815 bp, Glycine max
atacaacattggttgaaattatgacataaaaaacgatgtcaatataaacaagcaaatagacctaatgatccacatactacattgttttagcataatcaaattttgtgaataagcacactctcagatcacactctttatttgtagctgaaatttattggaaatcacataattttgtctctcttatttaataaaggataaaacttaaatgcaaatatgcaataccataaatgctattggtggtgttctcaaatcaaaattggagttttattgatatttgatggaatcctttactgtgcaaattactaaggtgaaactccaaatttgattagaaaacaacctatggtattgttcttcaataaactctgttcatgaatttgtaattttcattaaatttcaactaataaaaaagagggtaaaagatatgttagatagtgtgttgttagccctcctctaaatgaataagggtagggactagggagtgccttatagattagttcatcaatttagattcagattcagtaaaatatatatatatatatatatatatatatatatatatatatatatatatatatatatatatatatatatatatatacacactaaattataaccaagagaattacctcacagggatcacgaagagagtaaattgcgttgctttcttttggggcaggggacactaagatgccacaacctttattaacttctctcaaaacctgttacagtccgtttgatatcagttttaaggaaatctacaaaagagggaagagaaactgaaaacaagaaatttgggcatgacatcaaaattaaca

SEQ ID NO: 5910 - DNA, 852 bp, Glycine max
gagcagagcagttcctagaactttgattcatgagctctgtattattaagaacaatattatcaagctgttgcatggtgagggtggtactagattatgatgtacagagaagaagaaatggaagacaatttgcttagatatttttctaatcattttagaacatgttcccatctaaggatctgttttgataaaaaaaaaaaaaactaatttcagtttatggagaattttttattttttttctttctagaagtgcttctggaaatctaaacatgttctcttaggtcctaccaagtactgaagacttacctctggtcattgtaaacattttagtagaccttttacagagataatatcaaaacaaatgagtcccttgaagaatgaacgctctgggtttggatggttttcctgcctttttattttaccaaaggtaatttataggagaggattttattaacgggtgcttaatgttgatttgtatctcacttcttcaaatcacacattcacaacactcatttaaggcaaaaaaaaaaaagtgcttccaaaagatcttaggccaataagtatttgtaatgtttagatgaaaataatcataaagaatatggttagtaaactgaaggaaactctaccttatactgctgatgaggtctggagtgcttttgctcgagacaatgctctgtttgttggcttttgattctttacatgggatggaaaataagaaaggagcttcttatgactgaattttcaaaataaattggtggaattatctttttccaacgttcacatctattacttatctgaaatacaaactattcctttttggctaccatattagccttgattcgttcgcctaactaa

SEQ ID NO: 5911 - DNA, 891 bp, Glycine max
  misc_feature (851)..(851): n is a, c, g, or t
ccaaacttgcatgcctgcagggttactatatgcctttagagtttggatttaatttattatcatgcatatgaacttgaagtataaaagtttaattagcctgatttttaaaatgatatggcaaaattttcaaaaacacttgtacatgttaaataaatagactgcacttgagcatttaatttgaaaaggaaaccagatttttgttttgtaaacctaatctaactgacttaattcacttccatgatctcacggattgctttaattaattttccgtttatgtttagatttttttatattagaatgtcatattctttacggatcgagacaagagaattttattaggagctccacgtttaattaagagaaatatattagtattttattatatcaatgaaagtgtcccacataaatctattactttgaaatgtatcaataaagtaggagataataatagcttactaatggtattactcagaactggaaagtgctagtgatcactagattcgaaaatgtgtaactaatatcttatttgagtatttttttttatcatattttcatgttgttgctcctattaattatggattcctcgtccctgtgtatgtaagaataaatatttctataaaaattgtttacatgtaaggatattggatacattgaaaaacatggcacgatatgaatgaggttagttgctttttttttttgttagagtataaatttaatccctatattcaagattgttttagtcccttaatgtaaaaactcaacattttggtccatgcatgaaaaattgtctacaaattactccctagcctgtaccattgattaaagttatattgcttttccccacctattgncaccaaaactaaatatgtgtcaagtgtagagaccagtgta

SEQ ID NO: 5912 - DNA, 788 bp, Glycine max
aaaactcaagacagtgaattgaagtcaacccaaatttagaacaagcatgatccatcagaaaacacaatggaaaggcaagacaaaacaaaatcagagcaaagaaataatgatcagtgaaataataaattgaaaaatgcaaactttgcagaggagagattaaaaatgaactgattgaactcacagggtaaaaactatgatcaccccacggaatattcctttaagccaaagcccagatcttagcttggaacgtggaatggaatggatagtgctttgctttgttttttattttttgcttttttatgaaaagagtatggcatggacgatggagaaagaggataagagaacacgcgcacctcatgttcaactttggtagttgacccatcaaacagaagttcaaatttcaaagtacgtacatttgaattttgaccaaagcaagcaatatatttttttttcctctaaattatagtttttatctcttttaatttttatccgggactgtctttctttttacttttatttctcacatttataaaaaaaattaattttcatttaactgtcagatttttatacactattttttttaatttttactttttaattaattaaattatttcttaatgtaccttaaatacaaatatttagatctatattagatctaaatttcaattggattaaaataaaagaaatatatgtttgaagaaaattgagattgaccaaaattataaactttttttaaaattgaaaaaaaatttagacaaccaaattcgtgattataaataaaagggatc

SEQ ID NO: 5913 - DNA, 873 bp, Glycine max
ttgcattgcctgcagcatggacattttactcgatttattgataagtttaaattgctagcttctttcccatcccactcttgtactgaatatacattgttctgttggctttttacaatgtacatgcacgcctaatttccatctgttaattcattgacttgcttggttgatggaaaaagtttattcagttactaaactcttggagatcaatctttcaggtaagtggaaggggcatctccattaattcacatcacactatttacaaagaaaaaatgtcagcagatttggagaggtcgacttctagaattcctcaacttgatggaccaattccatatgatgatgatgatgtgctctctactccaaatgtgagtagtgacatttggcccttccttcctgcactcttgtgagcttttgtaactaaacacatttgttctttccctctacagccagggttgcatttactttgtctacttattctagtttcctgtcatcccttataattttgtgaaaaacgcatcccccccccctcccccctttagttcttggtagttggtacactttggctttcaaatttagccaattaataaccacattcaatgttgaagatttcaatagaactttatttgtatttaactagttctcattcataatttgagttattcttttgtcacaaaactataaaaagaaatggataatttaggtatatctgttcagaagtagatctttttggtaagttcagtattgagaaaaatcatagttttaagtattcccatttacatatggggtatctgtttaatttagtgtgagtatgagcttcatcttccctggtttatcattgataaaacagaatgaccgtaactgtaaaaggaactatat

SEQ ID NO: 5914 - DNA, 855 bp, Glycine max
cgccagcttgcatgcctgcagtaggtgaatgctggagaaaattatccattggtctacaatggatgattctgacttccttcacccaggataagaattcccaccacaggggctgaattttgtcacaagtgaagaacaaatgggatgcatactcaggcttgctgtggcagaatggacataggtcactgtcagtttgaatttgcctcctagctaggttatccttagtaggaagtctatcccattacaatctccaggcaaaggacaaggctctcgaggggattttaatatcccagagttgctggaatgccaagtactgaacttcagaaggctgctcatcttttaaaacttggtaagcagatttggtagagaagattccattagtgtcagctctccaaacccaggtgtccttcaagttgctatttaacctgattgctgagatttggtcaatgaattttgaagctattcccatctcattatcaaacaggtttcttctccaaagaagattccattcccacccactttaggagaaggatcccatatcagccactatgtggtttctttgagaggaaattcggtataaatctggaaattggtctttgaggggaatcccatcctcagctcaagcatcttcccaaaacagaatttggtcacccctacccaccttccagcagaattgattagaggcagcaatcatactctgatgttgattaatagcctttagggtcagcccaccaggtagaaaaataatgtttttgaggcccctgatccaatcctctccagcctttatattttagagatcaaaatcctattccaaagctggtgggggttgatgaaacatcagccatttccacttgatta

SEQ ID NO: 5915 - DNA, 841 bp, Glycine max
  misc_feature (824)..(824): n is a, c, g, or t
agtacctcattcacttagttcccttgatgttcccaattgtgattcgggttccattcacttcatttctatattctcacacaaatgagaaaaaaaaattaacaggtaaaaatatcgctggtttagtggtttttagttctgtctctagtctcttgttccatgtgtatttcataatcatgagtcgtaagcttgaccaacaatgttcatgttataaatttcccaagaaaaaaaaaagtggggatggtccaaaattgaaactttgtcaatcaatcctaattgacacttgagcttgacagttaatgttgtctgcaattcatggtgtaattgacagttaatttagtttgattttcaggctcttctatccagacattttcgggctatcggcggcttcttgaaggagacacagaagatttgagaatatgtctggatgcaataaatcacccaaaaatggtcaacaatcattcaaatattggcggattcaacacggaggggcatcctctgaggccgttctttcttgtgtagattattcgccatctctttccaccaatgagaacaagcaatgctatggaagttctcaaccaaagtcccctcagatactgagcacatctcagctcatctcggctataggcctgatatgggattctgccagtcgcccgctttcagttttactttcgaaggaaactgtgaatcaggatgataaaggattccagaaagagaaaattctggatagcgttgatgagagaaaaatgatttggtatatgcttcaaccgacattaagtactatcctgttactgagggaggtgcacagattgtgcagggaaaatggnattccctaagtatgcag

SEQ ID NO: 5916 - DNA, 779 bp, Glycine max
  misc_feature (710)..(710): n is a, c, g, or t
aactatcaaggtatttgatcacaaaatgcatgtcatagttgcttgttatgaaaaggcatatttataagaacaaaaatttagttggccatgttgaactgttgattctatgggttacttttctttataatttaatctaaacaaccctgtgtttttataaatatttccagattcaactttttatctgctgcatatttttttggtgattataggatatttagtgcctttgcaaaattattttgaccatgtgaggttgctctcttcctagagttatctttatgcaatatgttaatcttttatttattaaaaatattggtatgttattaccatgaacttgctataaattggagctaaaaattttaaaagtttatgaacttattatgccaaatgtataatttttctctgctctattcaaaactttagttggttttttttgcttaagttgttcctttgggcagatatgggacttggcaagtggagtattgaagctcacattaacaggccacattgaacaagttagaggtatgatgccaaggtattattggtgggtggtagcaattgtgaagcaggttaataataacaatgtgcttttttaacaggtcttgctgttagcaacagacatacttacatgttctctgctggtgacgataaacaagttaaatgtttgggatcttgaacagaataagggtcagatctccatttcatttattggntttggactgaatattttcagcagttactgggaactccatcaaattgcaggctactaaatacatgatatt

SEQ ID NO: 5917 - DNA, 827 bp, Glycine max
aagttagattaacttgtaactatctgaatcttcatcaaccaaatcagtattattgtcagcaatgacatttctataacctacatactttatggtgtgtttggtaccaaagaaaatagaatgaaggagtggaaaaggaatgaaaagtagtaaaaatccattctttctacagtttggaacacaccaaaaaaggagatgaaagaatgaaatgagtgggacccatgaaaaaaaaaaagcaatccttcctaaactggacggaaagctagcggatgggtcttcagcagcgtttcaaaactttgtattttgcagcaaattttatatgtagaatatgtaatagaaattttagaaattattttcaaccatatatgaataaaaataaagtaataaataaaaatagttatatactttttttaaaaggcaaattgatttttattgaaaagggcatgaaaaaaagtatatataatatgatttgtagtgtcaatattctaaatttaaataatcaaactacaaaaataaaaaagttactaatcaactttttattaattaaaataattatttttattctacactttccttttcttttctttcttaccaaacctaaaaaatcatcttactttccactccttttctttccatctcatttctttccttctacattctttactttcactttcttttccaaccaaacatactcttacagtaaatttggagctgtaggtcagtctgaggaaaaggggtgtctttcatgctgcagactacctcaattgtgctctgctccaatttcctttctgctatctaggtatccttaaggggtgtcaaccccaaagaag

SEQ ID NO: 5918 - DNA, 851 bp, Glycine max
cttgcattgcctgcagacatccaagcctttgaacagagatgcttgattttagaagctgtgtgagcgatacaagaaataccataacattaataatgctttaaatgacccgggcattgttacatcatctcatcgaggggattgtgaataagatattttcaaacacacttttttaaaatattttttttattgatcaaaatttactgaaaatgatgaaaatttgtgaatttcagttctcatatgaaaaaatcgtatacatttagaaagtgatagataaagacaaaattttacatgatgtattcatgtcaaaattcagcatgtgagtatcactcccgtgaacatacattaggacaaaaattatttttctggtcgtatgtgtaattaaatacatttaatttcagcatgagagtatcattagttttgtaaaatgataattaatttataatttttttttattaaaacatcatatgaagtggaatggaaacagtatattaacaacgagtcgatgatagggtttgtgaaaaacaaaaaatgcatcttagaagcgaatgaatttattttatcaaatatttacagggtgatagttttagataagcaaaggtttcgtctaatgttttgaatgctccaaactggttttgcagtatcaggcgacaatggtgtcaattaattctttttccaacattgactcattgttcatcccaattctcctttttcccttctaatgaattaatgaagtttagaatatcaatccattttatcaataattaatcttattaaaaaatgaatatattaatgggatcttttcttttaataaaatagatttttagttttactaaaaacacataatattagta

SEQ ID NO: 5919 - DNA, 920 bp, Glycine max
ccagccttgcatgcctgcagggctaaccctaaaaattttgttactgctccgagattgacttcgagccaaagagtagtatattttaattttaggaggactaaaaacatactaaaaattttgtaggggtgataaacaagcatttccaactttatagggacgaaaaatatgttttagcatactttttctgttttacaatccttccaggatttgcatatcaaaacaaccatgacttttttactgcttcagtttatttatatactggagttaaacggccatgctacaaagtttctttaaagggcgatacccattcaatcacagattcatactagccaaattttatgcaattgatagcatcatctaaaatgttttcaatagataagtaaatctcaagaagataagaggaagaaaaaaaatatccatccccaacctctctcagtacaaagacatggtttaaaacacatataggctccatatcatttaaaactgagcacaaattggtcaacctctgcattgcagcttctaacctgtcattagaaaaagtagacaaattaaaaggatatattatgtggttactcatacatatttaggatggaattattatgacatacattttgatagaaccattattttcaggaaagctctcatggccaggtaaaggaaaaccggcagttccttttggagatttatatgatggaatagaaactcttgatgtctgattcagatatgaagctgcttgctctggaagaagctgatgaaataaaaatgttagttttctgaaatggggccaacttggtaactaaaagtatttacctgattctctagggcaccaaatccttcttcagagtcaaggatatttattaatcccttccaatcctccatgatagattcaatcagagattaacataagacagcatccctgc

SEQ ID NO: 5920 - DNA, 862 bp, Glycine max
cgccagcttgcatgcctgcagctatgtcatctaacagaagtatatctctggcaattcttgagaaaactgactctaagactgtacacatgcttctcctgtaagttgaaggcagcaaaagcggctcccatatgatatgtactttttccagaatgaaaacaacctaatcaattacactcagtcatgtcatttgtgaaactaaaaatacatcaactaatactagtaacctataaatcttccccaccctgtgggttggatacagagaaaaaaaggaacaaaggaaataaggcataaaaaaaatacgggatagcaaatggtaatgtattgtagacatattagacagacaagaaaattacctggtctatgctaaatttagctgactcaaattgtttcatctgatgagtattctgaaatccatcagcaccatctatagcctataaacatgggcacatgtgggaaagtgcaggtcagtaaggcaaatgtcaactattagtaagatatcgctagatgcttcatgcattttaataaagaaattacctccttcaaattataaataacaaggtgaacttgtctctgcaatatttcttctgccaacagctgaaaccttggagccaaatcaacaaacacagcatgttccttcatggaacttggaaagtctgttcgatactgagaaaagaacataatgcatgagccaagaaaaaaaactaacataaaataaacaaggtttacattgtatgttttccttgacattttatttgaggaattgaccccagtaatgttttaagcaaataccaaaacaaacaaacattaaaataaaatgggtaaagggatgacatcaggaattaaaaaaaaattggttaaaact

SEQ ID NO: 5921 - DNA, 850 bp, Glycine max
cttgcattgcctgcagggactactgtccatggcaggcacttcagggcctctacgcctcaaattgttggatcaaattgcagagtaaattggtcagagggtgttattaggaaggatattatgcagtggatgatgcataactaaccctctctctgctggtagatgttggaaattgatggtgatagagtaagcaaatttgtcatatctgtttttgtctctttggattttgtatagttcgtcaagcttccttttggataaccagcggtcatgcatttgctttcagttttggttaaaagaactagttgttaacatcacggataatcattctgttgaaatgaataatgatagcagagattgcgtattgctctattttatagttccctacaactttggtttatgcaacataatatatcctaattatatacgatattgtgatatactgatagtgtgtttagattggtctaacctttactgatagtgtgttagagtacgcaaatttgttatctctgctgtctctttggatgttttacagttcgtcaagcttccttttggataaccagtggttatgcattttgttctcagttttgattaaaagaactagttgttaatatatatcacggattaccttcctgttcaatgagtaatgatggtgaaggttgggcattgctttaattcatcgttcccagcaaacttggtttgtgcaacttacagtttgatttttcttcatccatccactggattggctataccatgtttatgcaaacctgtataccataatatgttctaatttctattatgattaagttaataaaaaaaattaaccataagttgatgtgactcatgtgagattttc

SEQ ID NO: 5922 - DNA, 836 bp, Glycine max
accaaaagaatatccatacatctcactgatccatcctttcccatagatgtcaccagttatgtttgtcgcccagtgagccctatcttcccgtacttcttcggtttttgaaagccacaagggggcaaaaactcgcaggtcatctatatgaaaggccaaaagcccaccaactttgtcacatagttctgggtgtttcgtgtgcaatttagccaaactgttgtcacaacctattaagtacctggagaaataatatagaatatatagcaagtttcaatggtgagccaaggaaagaaacaccaatatgaaatacaagatataagtactcctttaagagatttaatcaagtttcataacttcaagaaaagctctctagcttgtgcattagaaaaaacctattccctgattcatatcgtcgagtgaatgcattatgaccaatgtaaatgtagaaaaaggctaaggcatccagaatttccatattgttataaattgttaatagctaaatgtaagctgtattagtccattagcctccttccaaaaatatctgaaatggaagtgatgggtaaatgtctagcggcttacactacatcactaaaagaaaaggtgtgaaaaagaaacaagtaaaaaattagtgaatacccataatatgctgcaacaggtcttcctttctctgcaccaagttcccaaggtataattggccctcggattatcatgtctgcatccagaatgacaacccaatcaacatttttttgcctccttactatgtttaagccagtgtacaaccccagcagggtttgtttattggcagggtacctgcatagtggataggaagatttattttc

SEQ ID NO: 5923 - DNA, 911 bp, Glycine max
  misc_feature (831)..(831): n is a, c, g, or t
  misc_feature (872)..(872): n is a, c, g, or t
  misc_feature (880)..(880): n is a, c, g, or t
agcttgcatgcctgcagatgttatgttatatctggcaatatagaaatgctcgaggttataacattcaactcagtttctgaacatgttgactgttacatggctttgcagtacttcccttcttacatattcagtgataagaaagcctgcttggctacttgcataaacagtgagtggacaaatatttaatgaaacatcactaagcctcatagaaaggaacttactaataaccttgtaaaagccagagactatagttataggtctataattctttaccttgaaagatctatccttattaggtactcgagtgatgaaagaggaattcatatttttaccaacagctctggaaaaagcaatagaaaaaccattggatcctggagccttttccttatccactcctggtagcttatctgaacttttcctgcacttcaaaggccctttctaaccattagtcatctaccctcatcatgaaaggacagcggtacaaactttcatccggtggcaataacagctgtatggaaacaggtaattgcactcgtgatgccaaataagactcccattcacaagaaacctatatgtagcttttccttcatcttggcaaacaatctagagtttgcatctctatcatctaaccaaacgaaccaactgcctactgttctgtctttaattggtttccactccgagtaccaactcttcaaaatcaatcctaaaccttgaccatatccctttgaatcaaagaaagagcctgcctggttctgatttaactaaagaataagtctcctctgttctacccctaagggctcaaaaatattttgattcctgagcttaaccttncccttatgcactgcaattgtgtcataaagcatagacccttncactgctncattctagaaatttgccacactttagttggg

SEQ ID NO: 5924 - DNA, 772 bp, Glycine max
tataccatccagaataatgaaaatattttactaatgactctatgcagcatattttatttgaaataaaactctggactatctatatactgtttcaatcagtagatgtacgctagtttttaccaggtctatcatgatcgagttatttcctatagagatcattctcattatggcctgactgtaacaattgctgtacagctgataaattgaaagaaaagtatacaaaatgataaactccgcctccccagtttgttctaacatgttttagaatagttagaagagggatctagaattggtcccgctgaaagcacctgtgaattgtatatagttaagggtgatgatggaatattatcataacaattagatttcagcttaaagtctctaaccagtaactttagtcagaggttcatagtattcttccagtagctcgaaactagggccccgctaacaatattattcacctcatatctattaacctgcaatgatgtcatctttcattgtagggattaaacagttgatgacaaagtgcactctttgtttttcttttcttttattaatactgtaatgataattgtttgattattgaaccatactagtactcttaatttaattaacatccatttaagtattttcagtttattgacctacaagaattttaatattaatagtgaagctgatcattgcaaatgaaaatttgtccaggatgtttgcctgtcatctacaagagttgctttggaaatttatcacacagctagagatgctatactactttatg

SEQ ID NO: 5925 - DNA, 819 bp, Glycine max
attttcaccacctctgacatggttggacgatcctcgggatagccttgggtgcaaagcaatgcaacctgtagaatcgtctcaacttcctttggatcataactctccaaatttctatcaacaatgtcctccaaccttttctctctcagcagctttttcacctgttcatagaagattcatcaatataaattatcaccacatcttaaaaactaaatgatcacaaaagctccaaggatcaattaaatagtacatggtgaaagtatatagtatgagtttgatttggatgcactatgagtgtatagatttttacattgtagaattcatctcaagatatggttttgaagtcgttattataaaagtcaacaaacatactataaatgacaatacatgattagaccatagtataaatttttttacatggttagcacattctaatttaattcatatattatttgcaaagtctagaggcaagaaaggataaagcattggaacaagcctgtaacagcatccacaacaatgcaataacacatttttatatcaccagcaagcagcatttatatgacaagatcaaataaatggtgaggcagattacataatcaatcagaagaacatcctcgtcctcttcaagccgagagaggtctaatgcacgctcaccggtgacaagttcaagaagtgttatgccatatccaaaaacatcagtcttttctgaagattttccggtggacaaatactctggggcaatgtgacccattgtgcccctaacttgagtggtgacatgagtcatccttgcatcaaccagcttggctagcccaaaatcaccta

SEQ ID NO: 5926 - DNA, 856 bp, Glycine max
ttgatttccttttttttgtatccgtaaactctgttgtgttgaggtccttgacgctattattattggtttacaggtttcccgggccatgtcaaaacaatatctgaaggttttgtcatctttaactctgaaagatgcaatgaaatgcatgcatgacagccagcagaagtgtgtgctggtagttgataaagaagattttctagaaggaatattgacatgtggtgacgttaaaaggtgtctgtcccagaagtctaatgacactttgaagagcgattcagggattttggatgtatgtaaaaaatgcccctgctatttatattcaagaaccatgtctgtttgcaaattgttttagaaccagttgttttctataattcatgaaataaaaaaacaatttttggcaagaaactgtattcggaataatttttagcaacatgaaccaactgttttctagagtttggtctagcaagaacagaattgctactatcttttttcttttgaagtaataaacaacgctttgatgaatggattttaaatgtaccattgagaaaatacactaccaaaattcatgtctggatcttcatgccatactgctaggatagaattgtcattaattttttattgtctgtatttgtagaatgtgggttttggcttaactcaacctcaaaagttagctcttaaggtgagggttacccccagtcgatgtgggacttgaatttttttcaatacaccccctcacgtccaacattttttaggctttgtgcgtggataacatggtgggcgaccttttcaatggatctaggataggttctgatatcatcttagaatggggatttgtgtctaactcaaccccaaagctagc

SEQ ID NO: 5927 - DNA, 842 bp, Glycine max
cttaagagatggcgactgaacacggcatgagaatctttttttctaaacgtttttaaaactggtttgctacgttacaaaatagtgttcagatatgccgggccgttgacattccttggaattcatggaagtggagattctacttgtccccttttcgttcatgaaaaacacaggtttgatataaattttgaatggtcttttatgcccattgtgatcctatttgattccgcatgacaaagcactagctctgcttgcaatctcatgctatttatttcacttcatgaatcaattgagaatgtgaataccacattcaagatattccatcctcatctatctatttttgtcccgttgagtaagcaaatgccatctgatgggcaaacagaagcgtgtatttttcttgacacacccttcttaacccgtgaagcacctgcatacacgaaactcgtgattaaccaaagtatatatgaaattttcacgctagggaagggtaaacctattcatgtataattgggagaatattgatatactaaacgttatgtaaaaaaaaaaatggacatgattagttaatagtagattagatatgaaccacactagaggttaaactggttctcttgtaaagccatagacacagcttggtactacttaatcagtcattcatcctatataatatggagtaatatgagtatatgacgttgcaattttctagatgccacttatgacaaaaaacgcccaccacattctaccctgcacagttgtaagggggaacttgagaggaacttgcaactagtcaatgggggcgttttacaaaggattcaaatcaactagcttttacaacgcccaccaac

SEQ ID NO: 5928 - DNA, 851 bp, Glycine max
cagcttgcatgcctgcagcacgcacagagagagccatgaatatcaagtagccaagcagtgaactagagaggcatggattactctacctattttagcaggctgaatgctacttgctaataaaattaaatttgttaatctttagcctttcttaatgattaaattgtttaacaatatgaattttctgctcttactgtgtttttaggtgtggggaaagtgtattatgtggtttgtaatattgcattagtgtcaatggaatcaatagggaagttatacctgggatgattctctcaccctttcgttttcttgctatttcttccatttacattgcagtggggtgtcaagttggtcccagcttaggtattgaagttagtgatcacgtatcctttagttagtttttttacttacttttggtttacacatatagctttggagcatttgatactaagaagtccatctttttcaagaattggtagttaacgtccagcttaattcttgaaaggtttctggttcatcattatatcttgtttttgtttatggcttagtttttttttgtgtggttcttatgtgccttttaagaagttggtttgtactataataagcttgatgtgttgctaactttttgtgttttcttgagaatgttcttatgtgtgtgggttttgctttggttgagagatcaagagaatgtcttgtaacttctctcttgtttccccccacccccagccattggatatctcccgtccaattgtagcatgcatttcattcagaatctgcgcatctgctaaaactattattctcaatgtctacatgtcgtagatttatccttatagctgcccaaaatgactcgagatttg

SEQ ID NO: 5929 - DNA, 803 bp, Glycine max
aagtatttttgacaaagcacacgaagatatgagatttggtgcctcagttaattcaatatcaagagcaagttcaaggaaatctagacaaaataacgacagagcatcagttgaggtctcacttaaatccctgttgccaatatcctgaaatattactactataacctatccttcagtttcagtgtaaattttttaagtttagtggggtttggtaagggggaagaggcaacaatagatttataaaaaccattcatatgcaaccaccatctaaacagttgatatttagttaattaaaaaagaaaaaattacctgttcggcaaccatcgtactaagctgtgcatcattggcctgaaaaataaagcaaaatataagcactcagaattggtagctccttaaattctgaataaaatagctgcaccattaatgaatgatggagacaccatacatgatccagtaattgtaaatgttgttataaacaagattattacatataggaaatacgctatacataggtcacggttataaaagtcaaactgataattaactcaggagaggtactgagtttgaggcaatgcaccactagttcaatcaatgagtatcaaacaacataaaagtacacaactatttaaatatttaatgaagaccaaaaacacacaacatcatcatcataattggaaatataaatcaattttaaactaagtagaatttatatctcaattatttaagaaaaatcttgaaaaagtcagcccaatgctcatggctcctacttagtggggtatgggtagcagtggtggacccagatatgg

SEQ ID NO: 5930 - DNA, 807 bp, Glycine max
aacgaaaaagcacttgagagatatagaatttcaaaaggcaagcaaaaattccatggacttgcacaatgcattctacccccaacccccaaaacataaaccttgatacattattcgttacttccatgtaaagttgaagtgtgatattccagttctatgctatgctagcatgtaaacattccatatgaacagatcaagatatcaagtatcaacaaacttgacagatgattatacaaaaagacaccaccaaatatttaaattaacaaagatactattacaaagtatgagatgagcctaaggagtttatcagggcaccatacactagatagtattttagcatgtgcatttgcacgggataaaatatttacttctatataactagacctgacatcattttttctataagtgtggttagttagtttctgaatgcttcttgtgacagtcattatgaattctctgacacattaaaaatgcaccaggtaaaggattattatatgaggagaaaggcaacacaaaaatcaattgatactctaatgctgactgtgcaggatcacttttagccagatgtaggatattatgttttttatttgaggaaacctaatttcatatataagcaagaagtagaacatagttaccaagatccagcgcagaagctcaatatcgtgctatggcatcagcccgcatgtgagcttacatggcttagacaactattccaacaactaaaattgaaagatattgaggagataaagcttatatgtgacaatcaagttgtaattcatattgcattaaatctggtcttcaggaaaggac

SEQ ID NO: 5931 - DNA, 841 bp, Glycine max
ttatattagaatcccagacaaataaaaaaacttcattcctatcacctcatggtctaccatctcgaagcataacacaaaccatcaacatatatgaaataaaacacgttaatacatatagaaagtgttatattatacaaacaatacttttctagctaaaatattttttatcatatttttttcatcatttttaataaaaaatatattttctctattattattttttaacacatgttacacgtattaggcatataagcagcaatcgtgtctcaaacataacatttacactgcaatagatagggttatcttaacaaagtgtgtatgcaaatcaatatggggtcatgcgtcttcatttgaccttttgtcttggtgtattagtctttttcgattctctcgacttttcttgtcttagttgccataataatgcatgaaaaggaaaccacacactgattccactttgcatgaatagttgagtgtgtaactgtgtaaggcaaacatatcatctcgttcagttgtcacactttgtttctcaaatctcacattatctcaaaaaccaaatcgtttcttccccgtttgtccttttgtcatttctccatcgaattgaactttaactcaagagatcagaaccagaactgaacggatccctatccatgaaaatagtgcattcactcattattttgcagagaaacatgtaagggagttttttttccttcccttttctaattgagtattgtttgataagaagcatccatgccctttaaaaaaatgtacaaaattgaagctttttttttctcctattccaaggtggactcatgggagatgctataattattttttggggggg

SEQ ID NO: 5932 - DNA, 899 bp, Glycine max
cggaaccccggtctcttctctaggatcgacctgcaggtgatgaaccgtacagagcagaatgagtaataatccatgtgcacacaaaacaccaatcaatagcaagttgtttctgtgacttgatacttctaagaaatatcatttccctcttgtagaaaatcccaaaacaatgaaatagaaacagaaaatcaattttctctctagataaataaaagaaagcagttatgacatatcatggaacccaaatctaaaaaaaaaaaaaaaaggtaataatctactgccaacccagatcagggcagaaactgcattgcagggaaaaacattctcccaaaaaaagtaaagaaagattgattaatagcatatgaagtgctcacagctcatcaacatttgggtggaaaattttgttcacaaagccaatagaaggggatttgtatgggtaagcatcaggaagctcaacacgaattttccagactccaccttcataaaggcctgcaacaatcacataaatttagtaaatcaaggaacaaccaaatagcttaaagataggtaattagtcttttgtgctcaacccatttaaagataaggaaaccaatgccaagctagaagatgaagtataactatttgatggaaatttatgctgatagaaataaagcgaacttctcattaaaattgtcttgtccttcctttttctccttcagaaaggaaaaacaaaaggggaaacatttatttaacaagcatttgattagtaactaattcttcatatacatgtacagtttcatcaaacaaaagactacgttaaccatagaattttgactgtacttttcttttggaccatgaaactccacattgaactcattgagtccatcatttatagtctcactgcataatcactcatcatctgc

SEQ ID NO: 5933 - DNA, 837 bp, Glycine max
gccaactcagcactcctctatcagaattggttagacaaaatcttctagatgctttggtaggatgatccttcttttgggcctctcattcatgccatgcctatgcttgtagtatcttgttgagccattattcccttcctaacagtaagcataagtcaatatatcatccataaacacaattttccagcacaaagtctttggttgttacataataataaaaaagatttttttgtcttctaaaacatcacctaattaaatcaactttaaaatattccttaccaaataaatagaaatccaagcttttgttatgcatatactcgtaaattagaatcctctcttcgccgtgaatgcagtatccaagtagttgtacaagattcatgtgctgaagctcacctataagcattagttcatttttgaattccgcagttccttgtgaagatgttttagaaagtctttttatggcaacttcttgcccatttggttggattccctaaaatatcaacaaaaaagactgtcattgaaaagaaacttgtaactatatattacaaagttaatggtttcatgccaccttataaacaggtccaaatcctccttgtcctaacttgttttcagttgaaaaatcattggatgctaacagaactgatgtgtagctaaatacttttagatcttgtctcttcttgaactcatcttcaggatctctggcatcgtagaatctatttgaagttgctaaatcttccatcttattaatttccatttcttttctggttttatctgcttagatgaaattatgagtgacaaagattaagatcaagggcttatgctcagaaaaatatgtaacat

SEQ ID NO: 5934 - DNA, 874 bp, Glycine max
tgctacgccagcttgctgcctgcagttcttacgagtgcaaccatctcatttgtgtaattttttcttttggtagtaaataacgcaagactgggattgaactttacttctctgtcgacaaacaggtcactagtttagagttatcaactgggataccattgctttacatatataaagacggaaagtttaacagtagaggaagtcctgtggggcctacagaagctggtgtttatgcatacactcaggtataatccctttacatggtatttatgggtgttattggtgagctgaaataaaaactgaatgcttctcaaattaatgaaggagcaatgctatgtgaaggttggggatatttaggaaacatgaaatgactacctgcctctatgcttgtgattgggtcacgtggcttagtttctttttttgcagtttttggtcttttttttctttttcgcattggctaatcatcacctgtatttatgatctgcaaaatggctcaaattttgtagttttattcttattctacttttttattttagttataggaaccaagttatgtgctaaagcaaaacatctgccaatgaacttatagcttacttgtcattggccaacctttaagatttggatgttatatgatgagatcagaggttcaatcctccaccaggtctcatctcccttcactacttatgtgcttgctctgagtgttatacacatatggaaatcttaccaagacttgtaagtcttgattaactccattttattggttggtttttgtttgagaactgggattcatctccccatatatatatatatatatatatatatatatatatatatatatatataattaaaaataggtttttttcaattcaagtaaaaa

SEQ ID NO: 5935 - DNA, 790 bp, Glycine max
  misc_feature (27)..(27): n is a, c, g, or t
tgcctgcccgttgctgcaaaagaaaangcgagaaaatagctctctctctctctctccgagcgtatgaatgtattgctttcactttctgaacgaaagcgttgttgtttaacgacatcaccaccttcgacccttccctttctaacgttgctgttgttgttgtttccaagaagccaagcattcactttagggagaaacaaacaccctcttcttttttaagcttctttcgtttctcatgtttcttcttctctgctcttgtaacttgttgatggtgtttgctcactagtccctttcctttcctctcctttcccttcaaacgaacgtttcttcatgtcggactcggccaacaagttgcgattggtgcgttgcccaaagtgtcaaaatcttcttcccgaactcgctgattactctgtctatcaatgtggtggctgtggtgccgttcttcgaggtaccctcttttcttctcttgttcttgtcgcattgtttttgtttttgacttttgattattacgagctttcgaaatttctagcatttcttccatcaaataatgacattcttatttgacaaaatttgcatttccactttttacttcattgctaggaaacgatctcgtacatttaattaatttttatttgcttattaatgatcctatattttgtgggggaaaattggaaatgggtggtcaagtgttttagtttctaattttagttgccatttgcttttaatttgcagcgaagcataaaggttatggtgagtggtagcttgtcggatgagggggaaggttggacttgga

SEQ ID NO: 5936 - DNA, 872 bp, Glycine max
agactttcttgtttcttgttaaacaaggaacgtacgtaactacccctttagaatatacatgtccatataattataatttcttcctattttacccactcttcttcacttcagcaggaacacggtgcataaatatggcattcggctagctatacctacttgttgcatgggtggcttgtaactttttttttgaaaggcaaataaatttttattataaaacaccaaatttccggcacacttttgtaaatttcctcccttgatatttcttctttcaaagtggaggtgttggatttggaagcagagaataagagaggtctgaacttgaaggagcatggtttgggagtggataggaaatgaaaagagtgggttatgggaatgctattagaagagaaggaatgagcaaactggaatgccgctcattgtttctccttacacacaactccaagttctactccccaccaacaaaacaaactctcttatgttatttgcataatgaccccgatgtgcatcacagggttcaatgcacaaatacttgaatttcaaattctcttccacaccaatcaaccatcggtttggtagttgcgcctctgcatctccccactgttcacttcactcactcactctacattcctaacaccactcattatataatgcaaaacatgtgccaatgacatcaaaatggtttggcaattaatcattttatttatattaattgataattattttacaaatcagccccatatatagcaatttaagttttagtgattgaaaaaatgtaccaagttttaacacataattgtaattgtctatcaaattgtgcttgcctttaactgtagatctttttttactggtaatgcacatagtcactggtaatt

SEQ ID NO: 5937 - DNA, 856 bp, Glycine max
ggtagttagtttacccgagttaagtttgctcagttagttagagttagttgctcaattagttagagttagttagctgtcctaactaactagcctataaatatagaactgtaagcagtgaatcttttggtttatgaaactagttttctccccttgatcatttctctgttatcttttctattatggtatccagagcctagttcgatcgaagtgatcaacaatggcagaatcaaacaaatattttccctcctcatctgcatccctttcttcctcttctgctttccccaattcgattggtgaaaagcttgatgattccaattttcagttatggcgacagcagattgaaccggtgatcaaatcacaccggtttcaatgttttgttgcaaatcctgtgatccctctgcgattcctcaaggatgtccatcgcaaaattggaaaagaaaatctggcgtatgaggtgtgggagcaataggatcaagttcttctcacatgactgcaatcgacgctctcaaagtcgattttgtcgtgctgcttggggagcatacattcatatcaagtctgggagaagatttgtgaatatttcaacaaacaaacatgagttcaagcaaggcaactgcgcactgagttgcgttctacgatgctgaaggataaatcgatgcgtgtgtttcttctcaaagttcaagagatcgctgattctcttgcttcagttggaagtctgatatctcctcaagagcatatgactgcttgaatgtcttccccgcggttatagttctggcatttctgtaattgaaagcaagtttgagccgtttccatacaaaagttgaggcttttctcttagctcagaagcttgattcccaag

SEQ ID NO: 5938 - DNA, 847 bp, Glycine max
  misc_feature (808)..(808): n is a, c, g, or t
acattgctaataccgagttgcctccaactcaccctatcaggctgggtcttgctctgaacttctccgtgttttactatgagattcttaactctcctgatcgggcttgcagccttgcaaaacaggttagtgtttagagaaactgatattttattttactttcaataatctccagtttgattacttacaattttttctgtggtaaaaacatgattatggtaggatgtagtgaaatgttcgaagtttgtgttgtccatgaattggaaaaatattcatttcattgtaaaaactgtatactataattttagttatgttgaagtaacgttgttttgttgtggtgactaaataggggattgtttaatgataaatgattgttacttgataaatttggttcgcttgttctaaattggtatttaatcgtgtgaacatttctgttaattttgatattttcacaggcttttgatgaggctattgctgaattggatacattgggagaggagtcatacaaggatagcactttgatcatgcaactgctacgtgataacctcaccctctggacctctgacatgcaggtatggctcttcagatgttcaccatatcttttgcatcttattcctttattgtcttttactccttagtgaatctatttattgattacggttgttattttgttgtggtttcaggacgatggtgcagatgaaattaaagaagccgcacccaaaggtgacgggggaacaaaattaaacataccatactctctgcttattagtcattgaacttcccttctgtaatggtttcaaaggaggagggngttgaatgctaatctcatgttactgagatttgggcattc

SEQ ID NO: 5939 - DNA, 805 bp, Glycine max
aaaccaagtattatattataaaagcagatattacacacaaatttctattttctaatacttacctgctctgctgtaatgccattttcataagcactatataagctttctttcgtaatagccccaacaataagatttggaagttgatactctaccctgtgtacaccacacgcattgatactaagcaatgatactttgttgaaataggcagctcaaaatttaatagctaattagtggtttcatatacaaatagtgtcagaaaaattaaggatattccaaaaatattatccaggaagaacaacttctgatatctataagtattatgtagttccaaaacacaaatgccaggaaaaaataaggaaagactagaagctttctttgacacaaattgcaaaatataacattctacaaagtatttggtggcataccttgagaatagccgcaatatctcacaatgtaatttagaagttgagtaagcataaactctaaaatttgtttccacaaccacaaatccctgaaaatattaaatagaatgacttttttttcattaatattcacaatcgtacaggaatttttattttatttttcaaaataggcatatttagtgttacaataacagaagataattcattcattaaagccaaccaaaggttaattgacatgtcaagcggtcatcagtctgggtagttagtgatgatcagtcaacacaagattcttgaacaagaatcaacacatctcctacgtgtattgtgtaatccagtaaaacttggaaactctaaagaacacaagtttatgcaaacttggaatg

SEQ ID NO: 5940 - DNA, 923 bp, Glycine max
  misc_feature (843)..(843): n is a, c, g, or t
ttgcatgcctgcagataaagtgaagatgatcatcttccaactggcagattttgtttggcaatattatctcgctcagtaacacaaacaaaccgaattgtcttgttaaagcctttgtttgtgtatgtaaaaaggatggtccatacaagaagacacatcacaccatatgaatgtgctatctagaatcgttggcaacatgtttggcgttatagattatagtatatttcatgcaaatgagtgtgatttaatttaatgcctcttatagaatgttgggttctaaaggagaaagaagaatctgcatagtaatgtgtaaaatactcagtacacagaaccctatcattcacttctcttttcaaaagaaacaaaatggaactatgtacaaactttctttaagaatacaaaaccaaaaaaggtgcagggtgcgagaagaggagaggataaggaagaagccaaagggatagcacagcacagcactcaatccaaaagggaaccaaatcaaaatggaaaaatgagaagcagaatcttagtcaaagtagtcaaactttaaccccccaaggaacacaatcgaacatatatatcgtatacgaagagctccaagattgttaatattattcctttctaccacttaacaccaagtccttgaaggaatatataacaaacaaggaaaaaaagagttgtcaggtaaattgaaaagaaactttaccttattttatttcatttgttctgctttcattcattccctccctctctctctttatattagcagattcccaatcatcccttccactgtttgggaaacaaccataattgcacccaacaggaccatagaaacctgagcttccaagntacccacttctttgatagccaatatatatacatatataaggtcatccatcaatctccatcaactttgcaatgcatgatgg

SEQ ID NO: 5941 - DNA, 843 bp, Glycine max
ctctagagtcgacctgcagatactattgaaatattgaataataaataactccactctctctgtacttctaaatcaataaattaacttgtcattggtcctctctcagttgcattcttttttattttgtgatacaaaggaccagtttggttaaattgttaatgtttggggtatcttcttaaccatctagttatttgctgttccctaaacaatcatcaacatgagaggttacataacatttctaaaagatctgatattcagagtgcctaaaaggagtatataacacttttggagtgaaatatcatttgtgtaaaatctggataatgatggcaactgcctttttcacaggagaaagaaaaagaacgttttgtttatattattttggtccatttgtatttcggatttaaattgcagtggtggaagtggaaaatgtggcaaaggaaatggtatatgatgcacttgaataaataatttatcctcgtacctattacataaaaacgcacttcagcctgatgtatattgttaatgagaatccactctggcaatccctaataaattttcttcctttggagcaagactagtgtagacaagcaaaataggaacaatatagccttaaattacaccaacatttgcaaacttattcatttactaaatgatgaagtatgcacactgaatttgtgaatcatgctgtagaatccatctcaacttgcgtaaatcatgtcatgaagttaattctccgctgtctaatatgacaaccttgttttttggcgagccattttcacttccttctgcttcaatcttgtacaaaacgtccataccggaaagtaccttgccgaatacaacatg

SEQ ID NO: 5942 - DNA, 844 bp, Glycine max
  misc_feature (826)..(826): n is a, c, g, or t
aagacttcgatgtctgcagtctaattcttttataaagaaaaatattattctatcgtcctatttatgtaattaataattaaaaaaattgtattttacttttagaagacaaataattagttgaaaatatatgtttcttttttcaacatcaatttgacgcatttgatatgatctgtgcacatatgttgggttcgagacagacaaaacgtatgacagctgacaattcagcagctacggttgacattctttttctttgtttggataataattatcttcctatacaaatctatagtattttactataaaaatataaatatatttaatattaatttatttgaaaatcaataaaaaaatttcaagaagtgcattccaagagatgtatcttgactgccaaatgttattttttaagaaagttatgaacctttgttatagaaagaagaagtcatcatctagcttagagacacaaattatacttattattcaaaagatattgtaaggagatatagaattatttgtttcatatataagaaaatggcttagtataaatataaactagttttccatctcatttcaagcattaatcctctcttttctttccaagcttcaagcttttctctttagctaaaattaggaccaatggttgtattatctctcctttattatacaatgatcaatcaattggcttcagatctcacaggattttggctacatgaaaattttgctagagtgatctgtgaaatcctaatcatctcttctactccattttttttaatctctctttctttcctatcatatttcacttattatattatcattacttcttatcttnttccttcttttctctcat

SEQ ID NO: 5943 - DNA, 846 bp, Glycine max
aaaaataatagaaggaaataattcacacaaaggatcgtatgacctcaattaaaataaacaaaatggaggatctcgtattgaatctttcctaagacgttggttaaataatatataaagtggatcaagtaaattaaatatgttgtaattagtaccaacaaacaaagaacaacatagtaaactaaaattgcaattcactattattagttaaaaatcccaatcttaggcttctatttaacagtgttgatttgggaagttttagaagcataaatcaaagagcactttccatacttaaaatatatttgacccaaaagaaaaggaattataatccatagctagagcccggagtatctaaaggtccataagtatcatcttttgattagtagaaaacccgtctttataggctagacagaatataacaagcaagcactcagatgtcgccttgtgcctaaagaaagtggttggtgtgtgcattgagggatggcggacgggggggggatatgaacagcaagacaacaatttacctccatatatgatttaggatgaggagcactagatggttcaacagatacaggaggggatgaagatctcactgcaaataacattctaatcatcagtaataattcagaaattacattaatttaatttattgatattaaatgtataacaacctgatcgggactcatagtctgacttcccattcacgatcagttgctgtgtctatttcaaaatttacagttgctaaaagtcaaaacatattttagacaactcaaatggggatcagaaggggggccaaaatttcattaaagctgaaatattcattactacatatataacctgacctttgaa

SEQ ID NO: 5944 - DNA, 855 bp, Glycine max
ccagcttgcatgcctgcagtaagtttgttcggttgtttggtatattggcctcgatgaaattgttgtgtattcaggtcttgtttggataaacttatcaatgacagtttatgagaagaaaataagaaggtaaaatgaattaaacttcttttaagttaaaattagcttgtgcataagttaaaatcagtttttggaaaagttaaatgagagagctcttaaaaaagttgaagtgcataagttgattttaacttgtgggaaaaatttaattcattttactttcttactttcttctcctataaatgcttattgagaaattttccaaacaaggccttagacagttcaatggccacacactttgcaaattactctgatgtgtttttttcatgattcttgtaggagactgtcatgattcttacagacataaacataggtgtgttagtggagcaatatacaactatacaatgcaacttaaatcagctgatgcaagcacttcatctgaatttaactgtatgcattcacagaggatattcttaatttgtttgtcacatacgaagatagttcctttaatttactcttctgattctgcctttatcaattacagataatttggcagaggcacttatgttcttgtcacattttgttggggatattcatcaggtttgctcgtcctagttcctatttaagatcttataaaaaacagaagttattattggtttataaagtaaatatgattttcatatcttttatccttgatttgcatgagtagcaaactagagtttgagtttacctgtgggtagataagttgggaaatgagaacttgaaactttaaaacaagggatggtgcgaataagtcatgaa

SEQ ID NO: 5945 - DNA, 872 bp, Glycine max
ggtacccggggtttcctctagaatcgacctgcagcagcagttgcaatgttatcaactgtgcaaatttttttcctttttggagtctcagtaatgcttagttactacatacacaaacatgcacataaccatattatgtttcttatatcaaatattattggcccagaagagtgattctactcaccactaagccattgtctgtcaaatctactgcacactgttgttctgtgacatccattggcgcactgagaagcaagcataatcgcattagtgttcctgagccctcctttttgacaaccctgatgtctccacccatcttgttaacctgccaccccacagtagtagtgatcagatcaaaggaaattatattcaaatctcccaatttattccagaagagaaaagtaaacatactaagggaattgataaaccttgacatgaaaccatactcttctaaagcaatgctcttgttattgttcttttaatacaagttgctgattattgcttcacttatctaaataatgtggtcatatatttgtgcagtgcagacacattttctgcttttgcttttcattggacacattcattatgattgatgaatggtaattgataagtgtactttacttatgtgaaactttacacattaagggtcttactcaccaagtttctcacaatgcaaagaccaagaccagtgcctccatgcctgaaatgagtaaaggtttcagaactccataaatcttcagcccatagcattcaaaaggtttttaaaccatatgatacaagtttcatatcaattttgaagtttaatgacatttaatgacaatctcctataataatatcatgttcattttttttagaaatatcatgctcatttgtta

SEQ ID NO: 5946 - DNA, 857 bp, Glycine max
  misc_feature (828)..(828): n is a, c, g, or t
  misc_feature (830)..(832): n is a, c, g, or t
agcagttgcactgttttcaactgtgcaaaagaatttccttttttggagtctcagtaatgcatagtctatcacatacacaaacatgcacataaccatataatatttctcatatcaaataatattggcccagaagagtgattctactcaccactaagccattgtctgtcaaatctactgcacactgttgttctgtgacatccattggctcactgagaagcaagcataatcgcatcagtgttcctgagccctcctttttgacaaccctgatgtctccacccatcttgttaacctgccaccccacagtagtagtgatcagatcaaaggaaattatattcagaaagagaaaggacaatgctcttgttatgacaccatacaaagggaattatagtagtgatcacacaatttatttcagaaagagaaaggacacatacaaagggaattgataaaccgtgtcatgaaaccatactcttctaaaataaatgacaatgctcttgttattgttcttttaatacaagtagctgattaatgcttcactttctaaatgatgtgttcatatatttgtccagtgcagacacattttctgcttttgcttttcattggacacattcattatgaacggtaagagtactttactaatgtgaaactttatacattaagggtcttactcaccaagtttctcacaatgcaaagaccaagaaccagtggcctccatgcctgaaatgagtaaaggtttcagaactccataaatctttcagcccatagcattcaaaaagcttttaaaccattcgatataagtttcatattaaattttgaagtttaatgacattnannntacatctcatatataatatcatatt

SEQ ID NO: 5947 - DNA, 830 bp, Glycine max
ataccatcccgggggtgagaaaatattatgaatgagaaagtggctatgtgatgaaagttggatctgacatctcacatgacaattcttattttggttccatacaatgttgataattccttattttgtttcaaggatattagtcttgaaagctattttgctgcttttttttttatctttattgtctgccaactttttactatgctccaattaacaagtattttcttgaccgtaaacttcttgaaattttaaattatttacagcttagctatacacataaacaaatttttttaggaatttagacagcagactatgatgcttacacaattgcatacaaagtactggattcattaatctagttatcttcttgccaatcatatctgttgggctaagattctcctggatttaaatttgatccattaaatgttgacttttgtgcacaaattagagatgatgttgattgtttaaggagttctccaagtaaccaggttaggattgttctctttggactgcaatcttagaagtgatattacattggttagaacacagtgcttgaaactttatagatagccatcattttttagttatttgagaataagacattcttttagattcatactggcattcctctatttgctacttatttgtttgtttactttgattttatttaaaagattatttattccccgatttcaaggaagttctatttcctttttatcttggaataatctgccatgttgcagtcattctctctcttctatgagtgaaatttcttgtttcactctagaagaagttacaacttactatatctactctacagttaaattgtttca

SEQ ID NO: 5948 - DNA, 801 bp, Glycine max
agttcttttgtatgtttctcatgtgttattagccgattgttttaagactcttgccttgaatcccccttttcgactcccatatggttcccacagaacatttttccactatattgctcttttgtcgattcggaaatctgacattgacacttgtttgatatatttagtgtcttttttttatatatataaaaaaaatatcaatttggttgagccaatatgcccaataccattcatgatggacgtacgtttaatttcaagaacattaatattgtaaaaataaacttatgtttttaacaatcagaataatagaatgaatggtgtggatttattctttactataatatgcataaattagttttactaagtaaataagttgtaggttttctctctccaaattttatagggtaagttgctatgcacaagtaccaaaaaaaaagataagtatatcaattagtaattttctatataaagaattttactaaccaacacattcttatttttttactatgtaaattataataactaaaaaatatcttaaaatagacaatgatataatttattaatacatttatactaaaaaataaaaatatatgtattaaaaaatatttgtggaatatactaacgtatacatttttattttttagtatatatgaatgagttagtcacttataattagataatattttaaaatatatcaataaagtaactttttaagtatttataatataaaaaaataagaatgttatatatatatatatatatatatatatatatatatatatatataaaaaaaaaaattccaac

SEQ ID NO: 5949 - DNA, 880 bp, Glycine max
cagcttgcatgcctgcagggtacttcaatccaaagaatggttgtgtctcactcatacatgatttcgttggttgattccaatctttccccctaaatcaccacaacacatacaccaccatagataacaaattaaaagcttgcacatttacattatcatcatagaatatagaaatatatatattttagggcatgtttcaacgaatagctcaattaaacacacatttaataagagcttatcagatgagaatttattcaaaaacttgactaaaaattgtatgctaaaatgagcagtgctatatcctccgaattgaggagtgagggaaaacatccgacccattaacagtttaacatctgtcattgcttgtactgtaaaacaataatttaatctctttccaaaacacatgtcacattgtaactgagtcggtcaatttttcggaagaattaagcggggaataaaacctttttttgattaaaatatgtttttgtcccatattttattttttctaaaaaaaataacctaaactatctttaaaagagtttatattaataagtttctttataaacctcattgaaataaactaaaaaaacttataagtcaagtttagaaattcaaataaatattataaaaactcttctaatctatacttaaatgaatgaattagaaaatttagaatgaagtagaaattaagaacttactggtaatgcacaggagaaattcctaagaagaagacccttggtttttgctggattgacgtttctttgaacccacttagccccaagttgttagcccttttatagtacgcaagaaacggttcatgtctttgaacaatttattattcacctgaacatagtcccacctgtcatgaatttttttaacagga

SEQ ID NO: 5950 - DNA, 805 bp, Glycine max
acaatggcgcaactgcatgcccatccacttgcacatggaaactcatattgttgccatgtatatggtgtaatattgtattggtggaacatgaggatattttatactattgtgtttctatgttgatccgtcataagctttaaagctcaatttcctggtaatatttgggtttcaccagacataattttgcatcttgaattcttttgaacaaagtcttcttgtcatgtgctatatcttatgcttttggtccttaataacttggataaaagtttcagtttctgtatgtgtggtttatataaatgtgaatttagttttccaccttaactttttcactgtctcattagcatattaacttctgttcttgttctcttgttactgttgttattccttcactatgcaaggaaatttagtgaaacatgtgcattcaagcttgttctagattctgtctagagaggcagtggttctatgtctgttgaaccttcaaatcaaacaagtatgagtctatgggtgtgcggatgcatgtctaacagaatgctctattcctactttaattttagtttacacatgctgtttactttttcttcaagttgtttccatgcagtcctttgttaactgaaaaatatcttgttataataagaattcaaatataatagaggttttatcacatgtaagggcacaaaaatgattgttagaatatcacttaatccctaaccaatttctcatgggctttattttctttgaaaagaaaattataagtgctattttatggaataaaatccaagtgtttaaggtaataatgatgtcaata

SEQ ID NO: 5951 - DNA, 833 bp, Glycine max
agtgtgggggggataaaagccctggcccggatggcttcaattttaatttcattaaacacttttgggagattttgaaaccagacttcctgagattcatggatgaattctacatcaatggatccttcccaaaaggaactaatgcttcctttatagccctcattccaaagattaatgaacctcaatctttcaatgattatagacccatctccctcatagggtgtgtctataaaattgtggcaaaagttttggcaaagaggctggctgctgttttacctaaccttatagatgaaaggcaaacggcttttatgaaggggagacacattcttcatggtgtcctaattgctaatgaggctatagctgaggccaaatctagaaataaaccttgcatggtcttcaaagtggactttgagaaggcctatgactcggtttcttggggctttcttgactacatgctcatgaggatgggtttttgtgaaaggtggaggaaatggataaatggttgcctttctactgcaaccatatccattttagttaatgggagtccatctaaggagtttacccctaagagaggtctaaggcaaggtgatccccttgcacctttcctcttcaatattgtagcggaaggtcttacgggtttgatgaggtcagctgtgtccaagaatctgtttagcagctaccttgggggatctttaaaagaaagaagtgaacatcctccaatatgctgatgataccctgttttttggagatgcaactaagcataatgttagaaccttaaaatgtgttctaaggggctttgagggagcatctggcctcaagataaacactctaaagtc

SEQ ID NO: 5952 - DNA, 799 bp, Glycine max
ataaaaatttatcaatcaagcttatagaaggattccatatattgactaatgcaaatataaaatatataaatcatagcgaagtattgtagcataccattttgatccttgaaatgcaagatcaataacaattagacgtttcatccaactgttgtctgtaaatagctaaattctgtagacacaaatggcagcatgcaacatggatattatgagataggttcaacaaaataaagacacaatctgaatcctatcaaataagaagacaacaaatccagaaaaagataatactatcttccttatatcctctgaactaaaaagcaaagtataattataagctgttacttggacaagaacccaaaccaaaaaaaactcactgaaccccaaaggaaatggattatatggctttctattaggctataggaaataatctaaatttaacacaaacagaacttacagcagcaaatttaagaggaactgtagtacattgcattcctacaattggcactaactaatttaggttgagctagttaggattactatgaacaacaaaactcttcgttagtttttaaatcagcagcattcctagggactcaaactcgagaccctagttgagctagaacaaccacccacaagctaatctagttgctccgtggtgatggaaaatattattgttttccatgtgtgaacatcaaatcatttaattaaaattttgcattcttaagatgcaaagtttcaagcttccttttgaaaccaccataaggaatggattgaagggggagcatcagatcttttttgttttcat

SEQ ID NO: 5953 - DNA, 854 bp, Glycine max
  misc_feature (828)..(828): n is a, c, g, or t
gttaaaaattggaccacttcttggtgataagcaagggccatgttttgccttttatatcaccttcattttttaattttgaattagaggataagtattctcactaatggtaaagtgagattataaattctaaggctattcatatcctcttcacaaaaatagaaatcctgtatgatttttaatcattttttaaggatgctaacatattctagcactcttattgtcctatcttgtatgattagtgctaataacatattttaacactcttttcaatacattttcttttaagaattagacccattaaacaaaaattgaaagcacatatttaataaaattctcataaacttcacttataaaaagaatgtattaaaaaagagtattatttcaatatcttgtatgatcatgttttgacaaaatgttaactcatacttttggatattgattaagaaattaaaatgaaaaaattttctattaagatgtgtaattatattgttcatgatttttttaatgcttttttttataattttcacaataaatatatatattttttcttttaattcttaaccaatattcactggttaatcatactctaacatttttttataactttttctttataagagtagagagacaagacatgattggaaaataatttggtagaggaattgcttaagaacttaccttacttaatgaggaggttttaccaaattaaaatttcaatttaaaaaaaaaatgtgacagtacaaatactctgttttttcagaactatggcccttgagttatatttgtaccgcacagcatatttagtggaccttgaccgtggagaaagtnggaagagttttgaagcttgactctat

SEQ ID NO: 5954 - DNA, 1118 bp, Glycine max
  misc_feature (1052)..(1052): n is a, c, g, or t
tgatacggccagcttgctgcctgcgaaataagttgatgtttatcattctgttctaagtttgttttgtgtgcaatatttgtattgcatttcggattgataagatcacattgtatgtaattttcatgataagatcacattgtatgtaattttcatgccgcttatccatatttaatctatgtcatcaagtatgagtaacagtggtgatcattatggtttagtcacgctaaattgtgatgaaaactgcaatggtttcctgttgctatatgagatgaatcagattgtagaaaaggagtctaaaagtaaataacatacggttgcgcgcctaaagaattttgtgatataaatgtctaaggttaatatgaagcctaagtggaagattgttagaaattttataattcctaattgattaatatgggctacatattatattataacatttatattagttatttacatttgaatgggttcaatataaagtgatctatttgagtgagcccattagactgtcaacagataattgatatgggcttaatgagcggaaaccagtttgacccattaggggataatgagaaccctaataggtttaaatcataagacatggttatggtccccaatacaccaaatcaacaaacagtttctcctttccccatctgaagagaaaacgaaggtcccataaggaagaaggtgatttggttgaggaaggtcattaaaccaattgttcgtgaccactgtcagattccgctgcgtgttaatcaagttctatggatccaggtattccttaaaatctcttgataatctgacgtaatgtgttttggtgctcatttggtattgtatatggtttatggaaaattcccaacaataggggcctacgacctggcctacataaagcctgacctgaactgacctatttaattaaaaggttaggctcagacttttttaaaagcctattaaattaaatagatcaggcttaggcttattaaaaagtcttataagcctgataggccggcctatatatatatatatatatatatatatatatatatatatatatnattttttggggggatcaatatataatattaattttttgggatacaattaatttttttttgaaacta

SEQ ID NO: 5955 - DNA, 825 bp, Glycine max
atagcaacgctggctactgctagctaacattactttgcgaggacggcttcgaacaaaaccactcatctcagagttgaagtcactagcccatcttgcatgtaattgtttttgacgataagtcacaggaggaatggtagttctagaattatgaacatgtggaccaaatgcccctgggatctcatgatggtataacataggatcatttggggtatcggggaatctgctgttaatgaatgaagcaggcagtgctggcactgaacctctttgtttgctatcatagcaatggaaacaagagcaagtaggtgggtgaagcattgcattatgcgagtatagttcatatgaatctggattagtatcaacataccgtccaggatagtagggatgcaaaggttgttgtgggaactggtgtggacctctcctcggcatttgggatgcaagaggatccccgtatcgatttggattatgcattgaaagagggaagttgggcatagccatgtcatgaccacttgcataagaatatggatcatgatgataattgaaatgattggaacctgccacatgcttatcagtgccaaaaaattgccttgaagttctgttcaaccctgatgatccatctgaaaaccaaggatcagagccaccaccataaggatgaggatccggaggaatcatcctttcttcgggaagaatctttcctttgggggttgtgaaccatttcagaagacttactgatgtgaacctttaactcatccagcttcctttaaagctcagcctcgatcctgctcaaggtgctgaaccatgtttggaccatttgattctttacgactc

SEQ ID NO: 5956 - DNA, 865 bp, Glycine max
gggtctcttctctagagtcgacctgcaccaagaagatctggtcttacaatgatgtttatgtcgatggaaaacccacacagggtggctttgctgaaaccatgatcgttgagcaaaagtaaattaaatcaattctttctaattattgcacttttccctgcatttttatttttttttaccattaggaattgacatatctggagattagtttatcataactcacgaatatgctaaatcgactgagctacatcctttaccctttccactacatgtttaattattaaaaaaaaaaatcttgtgagggtattttaattaatttgattgtgtatattgggggtgtcaggtttgtggtgaagattccagagggtttggcgccagagcaagtggcaccattactgtgtgcgggtgtgacagtgtacagtccactggtacactttgggctgaaggagagtgggctaagaggtggaatattggggcttggaggagtgggacacatgggggtgaagatagcaaaggcactgggtcatcatgtgactgtgataagctcttctgacaagaagaaacaagaggcacttgaacaccttggagctgatcaatatctcgttagctctgatgccactgccatgcaggaagctgctgattcacttgactacatcattgacactgtgcctgttggtcaccctcttgagccttatctctccttgctcaaacttgatggcaagttgatcttgatgggggtcatcaacacccctcttcaatttgttagccccatggtcatgctaggtaattgtgatacactttctattttgtttttagaattttcaattaattataaaattttttagtaacacttttgaaataagaaaaa

SEQ ID NO: 5957 - DNA, 840 bp, Glycine max
aatttcctctgctaggcagaaagactggcttggtatctggggtgagtagaatctaatagttatgaaatttaaagagatagttgatcttttgtcatcttggaacttgttgagatagttcatattttgtacataggctatgctggaaaatctagcattttctagtaatttgttaattatcaacacttgtatttccaaaatttagtttagattccttgagtcaaaatttgaatgtaaagttcatcatcagaaggttatattagtatgatatattactttccagtttattatatctggcaattcataataataatgcaaagttgtagaacagtccagctcataaattgtgacataatggttgatgggtatatattgtccttaaggtgaattttgttatggaaattttcctttcagatgtattacttagagtttctatgctttcatacataatacaattatgctttatagttaatttaggagcattgagtttcatattggaaatctaggttcaattcttgttgggtggctttcatttattaatgatggtcaagagaaatgctccttccaattatgcttagcttccactctcaaaatgctttgtactggaactctttttactttcatgagaaaattttaggttggattgaatttagagttagtataagagatgcctgtcttaatatacagttgaactgaactgaactaaactttttttttttttttccatttgaggattcttaaatgtgctttttattctcctttcaattgatatatatttctgggtttgtgactttttcagttattatttgatacatgtcactctttgatgttatgtatctgaat

SEQ ID NO: 5958 - DNA, 830 bp, Glycine max
tctgttggcagtcattgagatttttgtcttgtttcttagggctgtctatttggtgattttgttctctccttgtatagctatggctcctttagttgatttttttggcactcaatttagaaaaacatggattcatgttgttcgagttacacttgaaaaagctggtccagcattcattaagtggggtcaatgggctgcaaccagacctgatctctttccaagggatctctgtgatgaacttgcagaatttcaaacaaaagcgccatcacataaatttagctatagcagaaaatgtattgaaaatgcatttggtcaaaaattatctgaaatctttgaaaattttgaggaggaacccatagcttcaggtagcattgctcaagttcatcgagctacactaaaatacaaattccctggtcagcgaatcaagcctgttgttgtagcagtgaaggtccgacatccaggggtttctgaagcaattaaaagggattttatccttatcaatcttgttgccaagatttcgtctttattccctaatttgaagtggctgagactagatgaaagtgtacaacaatttgcagtctttatgatgtctcaagttgatctttcaagggaagcggcacatcttagtcgctttatctacaatttccgtagatggaaagatgtttcattcccgatgcccttgtatcccctcgtgccccatctgttttggtagaaacctttgacaggcgaaagtgttttgcactatgttgaccagcctgaaggacatgagcatttcaaaagtggcccttgctcatattggaacacatgctcttttaaagaagctttttgggaaa

SEQ ID NO: 5959 - DNA, 910 bp, Glycine max
tacgccagcttgctgcctgcgtccatggccccttcttcaaccccactttgtcacagcaaggttgccttcccattttttttttttggtgaaattcaacaaaactcaaatgccaacaaagtctatctggaattgaattgagagaggttcatattaatattgatatagtgagagagagagcgagagaaagagagaggggggagggagacttagagttcctaagaatatgcacataacaaggtgggatagagcaccaccacctacttatttatatatagaattcagccccctcttaactccaaagtcctcaaccccactaccgcaatttgtcttattttttatattttattttctgctatttatttctcactcaatttagatttaggtttattttttaaaaaaatatttattttcattcctaaaaatataaaaccgtgacaaattgattttaaaaatgaaaatttttaatttattttttgatgtgcaaaaagtacataaattaattttgcagataatttattctgttaattttcttttgtatttttctaatttttttattagtagtggcctatgacacgtgttatcctgggatgcgacacggtccacacgtgctacggtcttttgtcagaaaacgccacatcatcgaacttctttgctttggttcgaagcgtgagatactccactaattcaatcctctcctaaaacagtaatagtacaaataagcgtaaaactccataaataatgggagcactcgctattctttttattttggtgacacttttatttatacttggtatgattctgacgaagacaactctgaaattacgcgactctatgaatatcaagtttcacacggggaaagctgttatataaaaaaaaaaaaacatttacataggcaatgtaaagcataact

SEQ ID NO: 5960 - DNA, 871 bp, Glycine max
ccagacttgcatgcctgcagtgaattcagccatgtgatttttaagaagaaagtttttgaaaggttataattggtatctggataatgtgcctgacgctgctatttataatgtgagattgcagctacattaaccaataggagtaatctaactaacccacgtggcaactcaagcttccttagttgtgttcccctggttggccccatatacaggagaaatgtccaatttcaatatgggaactttagttgtgagacaagcactgtaatatgggtcaatgctttatgaggaaaaagcacggtctatttttttggagctttcaaaacttttaatttaatgacaaaaaagaaaaacctttaattgggattcctatatctttgagatcttttatcaaagttttatctgtagttggaaaaggctagttgtttgtagaagcacatagtttaggttagagtactcttcccaaatttgaacattatgatttatgactctttagtttgtattgcagagtggaacttaatcttttagcttttagtactggaagatttagtctcttgtttctgcaattatttcaacaaacattttcggaagctagggcttatttcctgatttttacttttaaattcttgctcaaccaacaacaacaataataaaaggctttttttttttttttccatcaagtgaagtcagctacatgaatcacatagggtcattcaacttgggtaaagattagattttcaaaaaaattatttatcaaacgatcccttaactactttttccggaatccttcttggtctcaatcccccttttcaaagactaaaaaccatgtaatataatttcctcatcgatgctttcagggaatttttctgtacacgtc

SEQ ID NO: 5961 - DNA, 829 bp, Glycine max
  misc_feature (757)..(757): n is a, c, g, or t
ggtagggatagcgaatcggggacggggaacatctccactttcccttggtctctcttcacaaaatcccctaggagaaggatgctggtggctttcacctgtaccatctgtggccagcgaaccacacgggctattaatccccatgcttacactgatggcactgtttttgtgcaggtaactttttgttttttgttaatcttaacccctgccttatcacatttctcaattatttttttggattgaatttggaaccgaatcctaaactaatagtccactgcaaaaccaaaccaattcttggtttaatgaatttaactgtggttgaactggtatgtgtgtaaatgaaatgaaacttttattttatatataaaaataaagcatgtattgacaacatgtgtgctgctagactagtggtgggatggcttgccatgccacatatcagaaaactcgaaaagacaagttatcctgcgcagccaccttcaagcatttttcaatgttaagacattgaattgaactgtttcatggacaaatggaccggtttgtgtggttaaatggttctaaagccagttttaaattaatggtttatatggattgatcaaactggccgattcttgttcatggttgaacatgtagactaattggtgcactctggtttttgaaagattgcttttttatttattctatgtttgtcgtagatggggagttttatctcttatcttttgcttaccagatatgatactaccatatattagaggagacttgntagtttatttaatacttaaaatttgataatgttataacttttaaatatattttaaatatttgatacataatt

SEQ ID NO: 5962 - DNA, 924 bp, Glycine max
  misc_feature (819)..(819): n is a, c, g, or t
  misc_feature (830)..(830): n is a, c, g, or t
  misc_feature (871)..(871): n is a, c, g, or t
ttcttctttaccacctgtgtataacccgtccatcctctaggatcgacctgcagcagttattcaactgctagcactgtgtagttatagagtgttagttctgttttgacagctgtctcaacatcaattctatctatataaactcatctgtactactctattacttggttaatgaaatcccttttcatctcctttagaattctaatagtattctacattacttgcacaagtgttggactagtcagacctttgctttcttgttccttttttctctatagctatgattactgaaactgttacttccttttcatgtaaccggaattcattgtgactttgacacttaatttttttaatgcttcaggcttatagtgttgacacattgactagttttcagaggaccataattaatgacctagcagaccttggattggtaaaaattcagcaggttataatacttccatgcttatcttttcagacgtgacaaggttcatgatgattttaattgtatatatttattcattagaatttgtcttctgtttcttctttttgtgacaacttatagggcaggaaaggaagttggtttatacctactaaattggcgaccaatctttcaatgagcttggctgattcatcatctagaaaacaggtttcttattggtttcagaatggatttatcttgatagaaaattttgaacatggccttgttttacgatgggggtttcttttaggaaaactccttcacagacgtgctgaatagtgaaaggctcagtagtatcaatgtgtttggtttgtttcagctgcattttttccgttgtgccttgntacatagggtnggctttattctctccttatatttccttcttcctttctatanatttacgcttcataaaaatagtaaactttgaaaatgatttagagatcttttgg

SEQ ID NO: 5963 - DNA, 861 bp, Glycine max
aagcacagatttctttacagttatgaagaggaaatgtggcacatattaatgaatcatagggtctcatcagttacatattaaccattcaaacattgcaatttgcaacattaaccattgtgtgtaagcacacccttaggccttagccagttagccatatgctgcctacatttctagctagtatatttttcccaagtttctttgcgtagtcattggtcaaggactttgtaattttcatattttatgtaatggatggttgagttttgaagtatatgaatttgaaccctgtaatgcaatatcgactgattttactatttaagtttgcatgcatgcaccactaccatcaacaactctatggaaaatctcgtataggacattaaaaaacaataaaaaaaaagtaggttggaggacaaataataatggctgagtctgacatgagacaacctagtgagcaatagcataaattcgaaggggaaaaaaaaatcctggcaatttcacagaatgtaaagcaaaggaaatattgatgtaatgtcttgtacattatgaaatttatgatcatacaaatgagttcaaagctaagtataaacatgttactatacaagtctctgacaaatttcactataaagcatgaaaacctaaagaatatacaagacatctaaactgaacttccatatgattaggcagagagtatatgctccatacacaggcaattcacttatgcaagggggaatatgtcatcatcattcgtcgttatcatccatatacctgaacttaagatcatcccatccttctcctttatattaaaacttgaatttaaatagcaatttgtctcctgaacaggttcaagtgatccacgagcttatg

SEQ ID NO: 5964 - DNA, 845 bp, Glycine max
agcttgcatgcctgcaggtatgttatgctatagcataatgaattatatgctagaaatgtatatttagacagatattggtttcatcattcatgtgaaggatttgattactaatcttagcatcctttttgtgcagaaaactttcgggcgctttgtacaggtagctctgcaactattgttactttccttatttgaagttaaagtggagccactacatatgttgatgatagttttctccctttcttaatctatagttatcagttgggatcaatcttgatatgtataattctcttggtagtaaaaactacaaatttgaacagcatcacatttcaggagagaaaggagtgggaagaagtgggaagtctcttcattataaagggagcacattccataggattatgccgagctttatggtccaggggggtgatttcacccgtggtgatggaagaggtggagaatcaatctatggtgataagtttgccgatgaaaactttaagctgaagcatactgggccaggtgaggttatgtgcttttgttaccgatattccattatatccataaatgtgacaatattaatatattttatattatttcacctgttcaactttcctgcatgattgccacctttcaggatacttatccatggcaaattctggggaagacaccaacggctcccagttcttcataacaacagttaaaaccagctggtaattttcaattacttgagttacttactctgttgtgcatgctcttgaaagttgaacagtcctgacttgagtcttgactcttgactcttggtattaacttctcatgaaaccctttcagtgacagctataatattaattttt

SEQ ID NO: 5965 - DNA, 826 bp, Glycine max
ggaataaatcaaccgattagcttatacctgcatttcttctaattatatgagaaactgcaagcaggctccattaggacaaaaccctttattattgctttttacagtgaatcaagctagggtgtaaaaaatttcttatacagaataatattgtagtttcaaaagaaaacatatatattccatgcacaacctttttcaatgatttcaataagattcctagtggacctggataggggctggtcacagcaaatgaaccacgctcatcaatgatagtgttctgcatacaacaaaaatcaaatgtgtcatccttgcaactaaacaaaatattcagatgatttgctagcacatctaatctcattctcataagcacaaataaacattagtaatggaataatgaaaaccaaaaaataaaaaaggatttcatccactatatggtagccttctacatttcttcttctaataagttctttctacatttcagggaaaagaagcaacataccacattatgcaaatcgttttctggcacccaaaggtatggctgcccccttctgactatgtacttaatcttagatgtatggatattccccttgctattgaaatcatgcaaaaacaacaaagacccattagcaaagtactaatactgcaaccggatcatcacaccacataatttttgtcacataagagagagaactttatacatgttaattttttccaagcaaaagaaaagggggaaatgggtacccttctttggcatcagctttgatagtattaagggaaccttgccagtttgatgccaatatattctgcatgcataacaaggcacatatat

SEQ ID NO: 5966 - DNA, 778 bp, Glycine max
  misc_feature (265)..(265): n is a, c, g, or t
aacaatgggtactgaagcagaagtatatgcagcagaagcatcagataaaaatgaccttctagaaaaaattcttcctgcaacagttggtgaatatatagaattggtcagagctcatactaatgctggtgagtataagtttatatgaatgatactgatacacagcaaaaccgtttaatacatacttaagtggtctaatgactaatctaatatcttcaggatcaaaccatcgctttgcatgccggcagctgcttttgcttggttgcantgtttgatttttctgatgttacaaatagaaagactgctggtgcatttctgcatgagcttatgtgcaagcctcctgagcatgaggatgatgatgaagggaatatagttgttcttggagatggattaagttttggtggggacaatgattgggctgaagctgtagccagtttagcaaggaaagtccatgctgctcctggtgaatttgaagaagttattctggcaataatagaagagctcgcccaaccttgcagggagagaacagcagattatgtgcagtggatgcactgcctctctcttactggccttttgcttaaaaatgcaaaatcacttcgctttcttcagggcaaggctattgaacctgatgagctactccaatctttactactaccctggggtaataaaattggtgcattctctattggtttttggcatttagctaactttttttgtggtgatggtggttatattaataaattttagcagatttatttcgacaggaaattgattctgcatc

SEQ ID NO: 5967 - DNA, 848 bp, Glycine max
atagtgagtaaaaatcagcagtcagcctcttggcctataaatatctatattacaagtccaagcaagcaataaccatgatgacaaaagaaaaaacttcattttctctatgttgggtatctttgtcatttgaataaatggattaaaaaatagggaaaaataaaactcactgtaatattcctttgaatggcttgtatcataatagaaagatcagaatcatagaatgtttttagagcagactgaataatcaagtcatcccacacctggaccaaaaatccaaatcactgaatttagtctatttattggattattgacagagacagattgcatgggcattatggccaacatatgaaaaccaaaaaaatatgtagaaaatgttagtgacaacataaataagaagcaatatcaaaagtgggtgcatcttgtacctacagtatgtgagaacacaataaggtttctttaaatttggcaccaaatgctaagtgtaggaaatagaaatcagtgcaaactgcaaaagcataaatggaaatagagttgaaattgaaattaaaattcattcccttgcttttaaaaatggatagagatcctgaatcttttccttgcccatatgacctgtttctcccaatcataatcaagaaagcaatagcatatgaaatcaataatcattaatcatatggagttccaatataggtaaaaaaaattcttagaaactatgaatctttgataaagaccattaaaaaaaaaaaacagacatttctcagtcaatcacaaacactgggagaaaatgcctaatacaatttagttacagaaggcaaccagcctgcatcatgtcaccaactagcatagaatct

SEQ ID NO: 5968 - DNA, 909 bp, Glycine max
gttagtatctatttcgttttttatgctgcattggaacatggtcttgaagtcgtcattaagctaaaaacaggtctaataagtattgtagaaaaagaacagaacgcaaaaaaattaattaaaataataacgagtttctcacttttataactcattttaataggtgctttaacgatacggtctatgtgaaaagtgaatcacattaggaagtgtaagcaaaatatttactagtatctgtgccattaattagcgctgcgtggctaacgtgcataaataacaccagtacacatttttcaattctgaaccgtaaaataaaaaacttgtgtaatatcgagagaatttatataaaaaaaaataccaactattttttaagcttattttaataattttttaaggataatttatgaaaacagtttacaacctatgaaaacaatttaaaattacttaagcacttaactaaattatccaaacgcatagaaataacttcactagattatagcacatacaaaactagacctcgggtgatcttcaactttggcattgacgcaagttcgcaagcgtgattgagcttctttatgtcatcatataaaccagtaacaacatttcaacacaacagtcctagtgatgttaatcttcaaccaaggaaaagagcaacaagtgatgccattactcctctctcgctaatgccaattattaaatacagataaaacaacaaaacaaaatgatttatgcattttatagttctgcattcaacatcaaatcgggcacatattcatgtctgcacagagagtgaaagcattccctaaatatgtccagcaaaatctgctaagaaactagtaccggtgcataaaaaatttggtgagccagcctattccattcggatcaaattttccaaagttcttttgatttcca

SEQ ID NO: 5969 - DNA, 850 bp, Glycine max
aggtattacattcaaacactctagtttacttttgggtacatgtattgtttcgtttagtttcatcccactcaacgtatttgttttttttttcaccgttcactaatgtcttgttaatgtgtggaaagtctactagatattatcttattctaagtaagtttatgtggttcacattgttaggcatgttccacgcaatgaatttaacataacccatgaaatgactaataactgctaacttgctaatttttttttttttttttaaatcaggcagattcatgtggagggtatctaactataaatttgagagttgggttttgtcagttcagtactactcttttgagctacttgatcggtggtgtatttggtgtgttgatgttttattaaacttttgtactcttgctttgaaactagttggttaggcaagttttagttgttttctattttatttcagacttttcaggtgctcatattcttatgatgatcatcaaactgcaaatatagtgagcccattaagctattactgaaatttgttgcagatttgaaattcttctaagatggatacttcttataggactggtggagtcaagtacgagtgcttgctttttggtatgattggtgcaactcaataacatttctgctttttttatttaacttcctttggctcagttttatgtggtattgtttgagaattagaagacattaagacaaaccaaaagaaagaaacagaaggaaataaggaattcattatgcaattctctgtttcaaatgaaaaaaaaattgggactaatttctgattccaaaggttggtcacagataatggatgacactctttacccattgagcttaagcctcc

SEQ ID NO: 5970 - DNA, 866 bp, Glycine max
ctacttggcagcttgctgccttgcagaaacaacctacatttctttccttataactgagcttttaccttttagttagttaaagacaaaaatattgatggactttaaccgaatatcttaagattttaggttaaaaatcccttgacatggtgatattcatgaccaataagtaatacttttaactaatctcaaattaaagtttagaataagttaatgatgggcctacagttcataatttcttcagggccaaaggacttttatttgaggggtgtacgacagataaaatcattttttttaacaaaaagatcattcttggattcttacctaacagtaacactataagctttcaagtcaaacagttcattgacatagcatgaactgtagctacttcaaggtcataagcttagacatcaaggccaaaggttataaatatatgtggtgagaagatatgaacacattagcacactgcacacaaattatgacaaatgaagaaacaaaggagtaattgtatggaagattcgtcataccaaattatattcagatgtatcatcacaaatttgtaatattgagtgtaacaccttggttgatagagtcaagcctgcttcacacatttcatcgacaatatcaagcgccacatgtacctgcattacaaaccagaaagaatttatcttaaatgcaaactccaagcttttcatatgtgaggagggatcaagttacaccaagagtaactctaaaagagttactcctcaatgtcctcatcagctcatcctcaccatttattttcttgaaatctaatagttataatgattagctaatcttaactattagattcaagaaatgatgatgagggacgagagtagctctctctc

SEQ ID NO: 5971 - DNA, 879 bp, Glycine max
tatatccccttcaaaaaccatctaccagcctgaaacaaacataaagaagccaatggcaaaatatcttcattaaagttatataggacaataatgttagccaagttcgtaatatcataaaatgaaaatgattgtgctatcaattaacagatgtttgaaaagaaaaaccactttaatattattacccatcaagagtccttacactaaaaataaaaacaaaataaaaaattaacgtatgaatttcttaactttcagttaagaaccattatattagtgtctttgtgaaatcaaggacagacctatctccataagaagtctagctacttcaccaagaaaagaagcaataaagtggaagcgatgcacttattctttaatccaagttcaccacattcaagaggtgacaagacaacctttgctcttggcaaactgatcctaaaagattggaaacaagaattctggaatctcctggtaaacactgattcgtgctttttccttttcccttctaatggaatggagtatgatgaaagtttatatattctaacctcatgttaagagtcacactttatcaggaaaactatgaaagtaaatcaggaaccacatagggattactatattacaatcataaatataaccaaaacatttagccataaacagtaagctagggatcatcttcgttagttgtcttatataatctccctgctgaatcttgacaccaaaataaaaacagttctatgttcccccaaaattatgttcctagtcatgttaatttggaacttaaaggcatagcacggataaagaagtcaggaatgtgagaaagaagaaggcccaagaagaaaatgcaattcaactaactttgccatatatacatcttcagtagtaaga

SEQ ID NO: 5972 - DNA, 813 bp, Glycine max
aaaagaaaatgcaagctgacctctattgctacagttgatttaggtgaatttacaaaatttccatcttcgttgactgccttcatattctcaattttttccttcagcttgcatgcttcaacttctatgctgagagaggagaatgtatcacataggagaaaagaataataatactcaagtgttaacaatggtgtgaagcattagagatcaagaagattatgcaatgtcaatggaagtggggaaaatcttttaacatacacagcattggttgaaagtttcagaatccaataatttattccagaatttagacttctgtacatgcttaattaaacattaaatgccaaaatatattcagggagcacttgtttatggctcagtaagcacataaaggcaaagaagtactaattaagtaaataaaagaatgaggagccttaatatgatatttaccactaagtaaccagtgtatctctgaccaattgaaaccaaatacagtatatcacagtaaactctattattagtgtattataaataataagtgatgctccaattgatcaaacatgaacagaacaagcaattataaagaaacacattccataaccctgcatgcaaaggtgaacaatggttgtaagtactggtatgctataacccaaacatacattagccaggttcaaataagatatctgctaaaaaaacaaaaaaacaaccaaacaaaacaaacatcaataacgacatgttttgcaacaacctcataagatcagcatttactttcagccctgaaattgcacattggacatattgaagtaactcttctcgctt

SEQ ID NO: 5973 - DNA, 816 bp, Glycine max
caactagtagagagaaatcgagaagggtggagagaagggctaaggttttttaggttttcttaaaatggcgtcattttgataattttgtatttttttttacacgaaacccaatatgcgtttttaaaaatcaatcagatcaccgggtttgcataaaaccagctgggtctgactgggtcatatcgggccaaatgcatggtcgatccaataaccaaaccaaaccggttatgctatcgagttccgttatctgtgttggattaaaagaaaactcacagaaaataccttttataatagagtttttatggtattttcaatagttaaggagattttgatattgttaatttcttaatcaatcaaattacatgttattttttcgttaattattttttattttttattttttaaaattagtccttgattattatttttaaaattttttaaattacaactttttcaaattataaaatataattaaagataactttagaagtttaaattctaaaatctttttagttactttcaacattttttataaaataatacttaaatctcatcatccatttataacataaaaataaaatagtcaattttatattataaagttatccaatcataaattatctcataagatcacataaaaataaaatagtcaattttatattataaagttatccaatcataaattatctcataagatcattaaattttatgataattactttaaaatctatttcttagatatgaaatgaaagttaaattccatgattatctaatatgcatttggatgggtcgacgtaaatggtatagattgccattggt

SEQ ID NO: 5974 - DNA, 877 bp, Glycine max
acgccagcttgcatgcctgcagaatttctatttcaaactttaatatcttgttcttgtaagttgagttgattataagatcgcaaaaggaagaacaaagaatatctataattatttcttgatatttcgataaaggttgtaactaaaatggaaatcataaacaagtaattgtaatagatcctttttctaatatgatactccaggtcataagtcattcggaaaagcttcacgggtggtttggtttcattttaaaatgcaaaaatgaccttattttcattttgtttccgtttttaagaagtttgtataggctaatagataacattttctcaaaccaaacagtctctaagtttttggcaagtttataaagtagcttatgaccttgttaactcaccataaagaagcttcacgttgaagcttatcaaaataaacttatttaacattatctaattgaataataactttagttttttcccccccactgtaaacacagaaaaaagatgttctatatagatgaacaactaaacaagtgtatttcgatttcagtatctgataggcaaaaacctgtgaaaataacagacttttagtgtctagactcacacaaacacttgctgttcaataaataatatctctcacttagttgtgttgtactatggtttggaaggttacaggtatgcaagtgggactcacagtaaatataaggaaccaagaaggaactcttaaattggctctcttagattatggatgttatgtgggagacttatctataaagttggacgggggtgcatcttggctttaccaattgtaagcaatcttcttaatcgatgtttctgaaaaatgggtactattcatattttccttttttgatattattcttgctatt

SEQ ID NO: 5975 - DNA, 843 bp, Glycine max
caattgtctactaatgccttgatttttgcaaaattctacaaactcatttgaggtaaattcaccacctctatctgttctcaaagaagcaatatatgcaccaatctccttttaacatgagctttaaaatttctaaacatggaaaaagcttctgatttttcatgtaagaaataaatccaagttttacgagtgaaatcatcaataaaacttaggatgtacctcttgttgctatttgattctggtttaataggcctgcatatgtctgcatgcacaagttgtaacttgtttgatgctctccataaactcttcttaggcatagagtttctgtgttgctttccagttaaacattctatgcatatcttctttggaatcttgactgaaggcaacccaattaccatcttcttatcaaaaagtgtcctcaatccgttatagcctaagtgaccaaagcggcaatgccaaagatgagattcattttctgatacaatttggaaacacaaggaagcttttggtatcatggtagccaacacagaaaacattctatttccactcatatctgactgcataattaatcctttctcagaatgatataccctacacttcccatgttgaatcaaaatagttaagcctttttcttgaagttgccctatgctcaatagattattcttaagttcaggaacataatagacaccagaaattgcctgagtaaatccattcacttgcatacgaatgatacccttttcccacaacagccattctggtattattggccagttttacagtttggctaaagctttcatccagttctggagaccacttctttgttttcaggcatatgaatggtgcaac

SEQ ID NO: 5976 - DNA, 811 bp, Glycine max
aagtcatgtatatcctgggattaaaattgagtttgctattttctctttgcttgcgttggctcttgattttactagaaaggggatcttaaataagataccatccctgcattataccttgtaagcgttttgtttgaatccttacatgtattatcttatccctagcgtaatattgcatacctgcattaagattttcgggcgacctttaattacgtttcttttcgtgtgctcgtaatgtgaatattcctcaagtttgctttacgcatggttctgccaaacatcggtgtgattatatgaagtcggcgttaagttttaggtttaattgcagtttaattccaatattatagataatgagtaattttgattctttaataattttttgttggatttaatccattattttatttttgttgcaattgaattctttcatgaaaattggtcctgtctaattcaatcccaaaatttattgaccatagcatgctaacccatattaggcatttgtttcttgcactctcaggattgcatcttgtaccttgaattgtattttggaaagttcattctgaaatgcaatgaaaaatgtaagatgcaataactcccattttgatacctctatcctccaagagcaagaagtcactttgagcctacattaatatctttgtttgtatttataagatttaatatcctaatttatcatgtttaaagaaagtgattaatttgtcataaatttttaaaattattattggcattaatatttttctttctctccaaaatgtttgttgatacaatttatctccttttatttagaagtagcagg

SEQ ID NO: 5977 - DNA, 853 bp, Glycine max
  misc_feature (811)..(811): n is a, c, g, or t
atctatcaatcctcctatttagaagttagaattctggcccacagctggttatgcttggagactaggtcccatatccatctacctctcaaagctgtattaaatttggacaagtctttgatccccaatcccccatcaatttttggagtgcagatatcagcccatttgacccaagagattctattatggtgttgatttcccccccacataaatgttctttgaagagacaccagtttatcttgacccaagagattctttgaggaatcttgaagaaagataggagataaatgggaagcgcattgaggacagattttatcaaggtgaccctgccacccatagataagtacttctgattccacttggagagcttagctttaaacttgttaatcagaggctcccaaaccatcctgctggaagcttttacagcaataggcattcccaagtagtgaaaaggaatgtccagctgcctacagttcagaagttgggctgcatcatgagcccaattgggctgaaaaccaacaatcccaaattggctttttgcatagttaatcctcagacctgagaccatttcaaatcccctaagcatggacttcagcacaataatattatcccaagaagcctctccaacaaaaactgtgtcatcagcatattgcaatatatttatagggacattttgcttcccaaccaagaaacttctatagaggtttttattcaaagcctccctcatcatgccagtaaggccctcagccactatattaaatagcataggagccaaagggtctccttgtctcaatcctctagatgggactagttnctttgtaggggctccatttactagaattgagatggaggctga

SEQ ID NO: 5978 - DNA, 869 bp, Glycine max
agcttgcatgcctgcagttatctttccctactttgagaattaatttagcttttcttttcacctataaatcttaataaataatatccaagtaaaataatatagttaagcataagcgcagagtttgtaggtttacccttttttttctggctttgccaaattctcaggttaatttcaatattttttcatttgacttcaaaaatgtagtctacatgacatgtttagccgcattaaataggtgaattagttattacttgaattacacactaacagcaaatttgttttgaattatgctgaatgcaaaagcgtgcttggaaggtgtgatcttccttttgacgggtgcatgtctggttatgttttatagacgcacgtcttgtgtctttttacatcaaatacataaaaataaaagataaagaagctaattacatttgcttcaatataactcgtttagatcttctgcaatttacaaccaaacacactgaaacttgtttgagatatgtatcaatttacttacaatagaatttaattgaagtgctggtagttcattacaatttcaaacaataagttttagcatgattgattactattcaactagaacattacaggtcataaattcttgaagcctttaatttggagagttctttgtttgtggaataatgaaaaagttctgtccgaaaatatatatgactacttacaaacattctaacactcaagtaagtaatgtatttaaatagaaaaatataaaagctgtaagaaaagagggtacccttgagagagaaatctcttagtgttatataaagatgtgaaattaaaataaataaaaatggttaacctattatgaagtgtgtcttttacattatttaaagagatat

SEQ ID NO: 5979 - DNA, 766 bp, Glycine max
aactagtcaagctgatagagcaatcactttttctcaagaaaaggacaaaccaaacaaagcccaggcctatagtagtgagattggatgatggagatgtggcaccaatttcagtcaaaagaccagagccaatggatgatattgtgtaagtgtataatgtctgtatgcatgtattatgcccccaattaataaagtccatagtaaaaggtttgaaaggtcccaccagttcacagtttggcatagttttatagataatgctttgggaaatctcccattttgtcccacccaaatttgtaaagttacactctttctagtttcttttacattattacaagcaagattatgaagattgaataataagagttattgatgtttttcagattgaattacaagcaagtgggaatgagaacattattgaaagtattctccttagttggctcatgttggagtattctcccttcttcctctgtatcttctaatggctatgtggtgttatcattattgaaaggtagtaattcaaatttcaacgaattctatgtttatcaaaaataaaaaattatcagcaatataatgatctagtaaggattagttctaaattattttactatatggctgctttgatggggaatggctgccagcaatgcatataatcaaaatttaaatcaatgaaagaaactaaaagatattgcatgatttctatattggtataggatctatctaaaaattcaaataatttatattcagctacattttcttttttagatgacta

SEQ ID NO: 5980 - DNA, 846 bp, Glycine max
agcttgcatgcctgcagtaccgaacatctagattacttcaaagtgttgctgtacgacttcgaaagcattctaaatctcttggggattttggtgcatggaatagatgtttgaatcaccttttgacacttgcagagtcacatattgagtcagtcatccttgctaaatttattgaagccgtgcagaggtgcttccttagttcctagcccttgtgtattatctcctttatttgctcaattttgtattttatccaattttaacttgacttatatatgcgccagctgtcccgatccaagctcccaagctgctctgaagctcgtctgtgatctttatgctctggatagaatatggaatgacattggaacctaccgaaatgttgactatgtggctcccaacaaagccaaggtataataatccttgaaataaaattagtactccaatatgttgaaaataaattaatgcgcaattgagtacaaaaattaattagctgtttctagtttttcctaacagctcacagaaacccttaattaccaatgggttaatagctgatactggggggccgttctaagaaactgagaatgactagtgataacctaaatgagatggtactaggtctgcctgggacaattatgatggctggctttcatattaatttgcataactttggtagtagtttggttagataccatgaatgacatttttatccaagggacaatgtcactcattatttggctacgtaagcactttcttttttgaaacttcatttctcaccccatcagaaaattttaggattattatatttattaaggaaaacatgatttaagaattatggataatttcatatccata

SEQ ID NO: 5981 - DNA, 845 bp, Glycine max
  misc_feature (817)..(817): n is a, c, g, or t
gataattttttacaacgtgtccatgtcataatggttctttaaattatactattaaattgaagatacacatatttatacttgttcacgtattttttatattttatgttgattggttggagatctttttgttgagctatataagacgaaattatagacaacctactccattattttttaaattaaaaattatgatgattaaatgttctagaacaaactacgcaaaaactgtgtgctttttttcttttttcctagtagttgtttaaaaagaaattagagaaggaaaaaaagatttattcaaatcaaacccaaagttatgtattaggtaaaattaagtgagatttaagactttgagcgtggagacaaggcaatttacctctagcaccaaaatatgatagatagcaggtttcccagtcttaggataacaacaggtttcccaatcttaggatagcagcagctctgctttgtgtcacagtatgctcctggccactgcatgatacatgaagaattaatcagaataaaatgtgaacacacaaagacatacataaatgaatccagtagaaataaaaaagaaagaaaatgaaacactaaactattcatgatctttgatgcttttttcccttctatctctctctctttctctcttaatatgaactttggcacttcacacaagcaaaaggaaataatattgttgataaaaaatataaaaataacaatacatcaaaattagtttccataattttaagtactagttaatctagtttctaaaatatataaaaatagcttttcatttttgaattaccaaagctaatcatttagncttttatggtataatttcaatactaaga

SEQ ID NO: 5982 - DNA, 821 bp, Glycine max
acttgcactagattttgaaaccttgtgacttgtagatgatcttttctcaggtttagttgaaccaccaaacaatgaagcagcaagcttttgcttttctggagtaatctcaacctgtgtctttcttgaatcataagtatcatgcacttttgaattgacagttgtagcaccatccaccagagttgccccactcgttggtttttgggaagtagaatacgaggcagaggcagatgatgttgaagatgaatacgttggtttaccccacttcttctgaacaccatcaagccgtagcttaagctctgatgatccaacctcagaagttgatcccactgacgagatatggtgggtctccctggaagacaatacatcgggcactggaacaatgtctgctgaagatgcaaatgaaactggagtaactttcggttgcattggaggctttggaacttcatatgcctcaaatcttagaccatgctgcaaagtttcatgatgatcttggcttctgaaatttttcatattccccattccagcacgcacatcctcaggaatataggattcagcacctctttctaaagactgctgaacatacccattgaggaaagaaagattcttatcaacctgcataatagattcaacatgtcaatactcttgcagcagaaaaataatatataacatgggattattcccaagcacaacacttgctattgtttagtgaaatgaaattgctatgcagtgcatatatataaaaaaatagctgaaaattttcgttttggcacaaattaattgagattaatcaacgatcataaagaaaccagaataaatatctg

SEQ ID NO: 5983 - DNA, 875 bp, Glycine max
agcttgcatgcctgcagttctgctgaatcagaaactcggctatctacgttgaattagcttgaataagcatcccaagaaaaatctaaaatgtttgatttgattttgcaaaatatttaatatatgcactcgcaaaattgtgctgtagtatgtaactcataccaacaatgctcaaccaatgcatcatgttccattcgtcttgagctactggcctgtggtgttgggaagcatgcaccattcaacatgcgacttttgttacttaggtctccgacatccaatacctgacacaagaaaacgcattgtcacaacattataatttcttccaataaaatttgttaacttttataataactaactaccttaaaaattatataaaccatgatttatgattgaatgataaaattgttttacattctcaatacataaccattaaacttttcttttgaaccacatacataggatttggctgcacaaaagcagtatagatttttaagaaaaatttagaaaagctcagccaaaaaaattttccagcatccatgacaatacatcaaattcaataaataagttatcaatatcatttcgttagcagacagtggttaaaaaacatgtcagataccaaacaagagatcacataaaacaaacaaccagcattatgcactatagtagttttcgcttggcagccaaagcgaaccacaagcttcaaaaggaaacaattatacttacagttctttatatgctttccttcctcagtttctgtttgagctagcaactacatagaaagccatgtttgtaataagtatttgaaagaagctaaaagtttaaatcgagcgtaagaagacttaacctcagatatttaaggcataattccaaattagata

SEQ ID NO: 5984 - DNA, 1046 bp, Glycine max
aagaagatgcaaataagcagattagatatttgtcggcagattaaataaatttagaatcccagaaaatatgtcctacagtattgtgagcatcagagccaccgtattgctgagcaagagcatctcccatactttgatacatatccagtagagctacagcaatactactatcaggatccacttttggaacatcagtcaaacccattgcatggagctggcgtcctaaagcttgaagaccatatgcatactgggcaacatttgtacggtccaagcagtcaatgcagttggtgcggagaactccactctgaaaatgtggtgcatcactactaaattattatcttttttattctgatggttcatttcagtctctttgtcttgattaaccacagaatttagcatttcattactgttcccaatcctcacaagatccccagaactagctctagctctcatctctcagtgaagtatccctataaaaatacacaatgagttgaaaataaaaatagaacttcctttctctaaagtagcatcttgcacttttacaattataaaatagaactgcaataatattaagcaaaaaaaagaatcacccggaaataacactggcatcaatgattttatattaaatctctaacattttccatttttcgctagagcctctactgatatagccacaagtgttgttaccttaccaccatcaaaataaaataatcattgaattatattatgcatttaagtttgaagttatggtaacgatattatgtgtttataaaatccaaaccatacatctaatcaacaacatagacttaaatgtagaattacaatttattttataaatccttgtgcaatacaaatataaaaccagaatcaagttacagttctaaactacattttccccccaaatggagcctagtcttgaatgccctaattggagagataacagagatatttgactactggtataatgctaatatttcttgggaagcattgatacgaatacctagcagtccattattgtcagcaatcatcattattcatttacagattaa

SEQ ID NO: 5985 - DNA, 805 bp, Glycine max
atacttcttaagggaattaccagatgcagctttgcttctgagaccatccactatgcccctaagaccctcattgaactgatccatatcagttgcattgttaaatccacagaaagtacgtagagtcaggttccatggtctcgaatattgagcgatttgagtagcgtagcatgcaattatcataccacccaatggcctctttctaggttggacaacgctgtgtgagtgatgagaattccaaagctgtctaagtacatgtctaagtacagggacctatgacagggataagactaaacagtcagagaataccctccaacaaatgataacagttatacttcacaaggctcaaatgaagaaggacgaaaaccagagtcactcccaagaatcttaattactgaaggtccaaagtaatttgaaggttcatattcaatattttctatttttaaaattaaattaaattaaataaattggtggttgaatcctataccttcttagttgcaccaatttcagttaatgctacactatatgtattcaactctcattttgaaggaaatgaacttttgacatttttttcaaaaaatacttatgtatttcgttagaacttctctcaggattccttgtctaatcaattttagatttatcaaagttaaacccttgtgacgtgtatctctgacttatcttcttccatctctgaagtgactttatctgattccttgacctataccaaacgacccgctcttaataagatcacgtcatcggactctagaatcatttaagcaagcgtgtggcttaacatcacctctacaca

SEQ ID NO: 5986 - DNA, 909 bp, Glycine max
tgcatgctctgcagaatatgaatgtcatagaggtaacgttataactttgttaattagcatataattcatagtttttgtattaaaggcgatggtctccaaaagtatgagctcttacttaattattgttataatatagggaggattagctgaagatttgaagtgtcgatttcagtcagctgaggcagacaagaagtgctgggggaaaatatgccgaaactttctcgggggaaaataatagagctcgtgcacttgttatgtatatgcatctgaattaagacctttatttgtaaaatagaactagatcagtgcccgcgacttgggcagttattgtatggcatgccacgtatggaattacaaaataaaatgaaatatgttacaaaaaaaataacccaacaggccgggttaatactgaaaggtttggataatatatagtttacacataatctttaactttaaatttgattgtcttgtaaaaaaaatccatagaaggaatcaaggaacatatatacttttttctataaacaaataagattgggtacaccgtgcacacatgtcctcattgtattgggtataacggagattataatgtacggaattggaaaattatgaacactgaaatttggtaaagtttattcatcagttaaatgaattaagtttaagttaaataaagttaattaaacaagcaaactaagaagaaaatatgattgaatattagttaagatgatttgaatatttgcaaagaaagcagctagtcctattaagggtaagaaaagtcaagggacctcaaggaaatatgaaaacagatgttatgatgaataatatctctacaatttaatttttaatttgatctaacacattatatattctattgtacccggcttcatgatatattttatggataaaattaat

SEQ ID NO: 5987 - DNA, 773 bp, Glycine max
agaaggaggctcttttttatcaggtgccaaaatattttgtttctgtttgtagtttcttttctttcagctttggtctcagtattactctttgcatgtctgcttccttttcttccttctgttcatatttctggactcaatctaacttcaaacttttttttttccacaaaaaattacctaaacccttgtaagtagtgttaagcagatctcaatccttatgattaaagtggatcagttatgtgttgcagttttacggatgaagagcaaatcagttttgaagactttaatttgtgatgaaaaaattaagagttcaattactacaaattaaagtcttcataattaatttgtagtaaatatattatacttaactgtaaggcaagattgtgttaggatatccattcaggattttttatttgctcccaaacatccacatttcatgcatgtctgacaatttcatgtactgtaggtgaaccaggctattgtgggcattcatggtttagatgtgcagtttgctggaatcaaattcctcgattcattggtatgagatattttatgattaagaaatttttgccatttcgcttattgctttggatgttaaatatgttttttagtttttgatttatattcaatatctgtaggtatcagaattttctccatctacttcaagtgctatgggccttccaagggaatttcatgagcagtgtaaggaggtcacttgagcaggactacctaaaggtctttctaattttgaatatttattttcacttttcttttac

SEQ ID NO: 5988 - DNA, 796 bp, Glycine max
aagaaatgagactccctctgttgaaaaacattattgcatgaaaagtatattatttctgaattccgattccttatcccttggttatatgctatatgctgtttttgtccaaggagaatatttctcttgaagaaactgttgcatgaaagacaatatatgcctgatcctctatgccatggatcaataatgaaaaacacatgtgaattgtgggcaaacaatggaagatgttattgctttgcttggtcttcttaggcagttaggcaacatgctgatgcatcaaaaagagtattgatggttccatatctagaagataaactggaagttatcttatacccaaactaaaaatttccttatttaggtgtttatatgctttagttattttggtggcttcttgtttgtgcataaatatagtttaccacacctttttttactttacattttttctattaatgagatagtaagatattcatattttagtgaagagagaggaagaatcttttaatgcatccttgtgatggatgctcatgggtgcaaaattgattgtggctgttgcctgataatctgtcacctcatttacatttcaattttgtatttaatgcaactgtgactctgagggaaaatgatgccaaaaaatgaaaacgatacttacatgattcatgattatttgttgtcgaatgatatcttgcaaaaaaaatttctttcgataattaattaagaagctaaagcatgtttttgaattttgaagacagtttaatagcattcctcactttcttatgcagattctaagcctataccacag

SEQ ID NO: 5989 - DNA, 941 bp, Glycine max
  misc_feature (569)..(569): n is a, c, g, or t
  misc_feature (904)..(904): n is a, c, g, or t
acacttcgccaaacttgcatgcctgcagaagctcacaaatatgctgaataaagtgctgatccggattataagggaaaacgcccatcatatttacccaagactgtgactcccaccataggggactaattttactgcagtggaagaataagtgacctgcagtctcttccactaatatgcagaaaggacacaagtactcttgtaactcaacccgcttctttttcaaattaactttagttggcaatttgtcttgaatcagcctccacgcgaagatagccactttccatgggaccctaagcttccaaagttccttgaactttccatcctgtccatctcccactgtgacatgatgaattgccttatatgcactcttagtcgaataacagccactaggctctgctgcccacttccattgatcatttaattccggcctgattgtgaacccttccagctgttggaggaaagctaccgccatacctatcttgctatcaaacaaaagtctcctccacttgaaattccgctcccacccaccttctttcacagcacctgcttttaggctttgatattgtaancagtatggttgtgatccactcattttctcttcctatacctctctgtactggcttatcataaattaaaatacaatttgaaatttctctgaagtctgaactatagttttcgcatggtatcaagaatctggaccaaatgatcttgagaaaatgaatctgggctgcatctgtgagagtgaatccacaatcattttcacaattgaacaactttacactaacataaaaagaactaaacttggaaatctctcactcaaaatttctccttcgcatcaaagccatcattgattccctgtttgctggttgatcttatctcaactcaagtaattagatgtcattgntgagggcctaccagatgaatatgatgccatagtaccc

SEQ ID NO: 5990 - DNA, 836 bp, Glycine max
  misc_feature (322)..(322): n is a, c, g, or t
atgtaaggagatagaaaaagatgacgaaggagcacactgtatttgtgaaaggatagtgccgttcatgtcaaagcgattgagtagaggatctgtaccaactgtcaaaatctgagtaaaatacaaataattaacaagaactatgagagctaaaattatagtgagaactattgatattataagaacaaataagtcgctcaatattcagaagagaacaagtgaacaataatttccacatgataaatactgaatgataattgcaatacttacatttgaaaggagaaaaatatgcaggcaattttgcaccagaaaaatctaggagctnagctaacaaacaaaaatataaggacagactccaggtactgaactgtgaatctacagcactatattccttttaccagagcggatacttcatctttttaccagagcatatactttttcttttagaagattacaaatgacccaatcaattttgacagtgtcaccacaccagcccatcagatacacatatcaccagacaccaatatcaaatactatcagaaagttaatattactaatgacaattgaaacaaccgaagaaaaaatagagatataactgactcacttgattattgtcaaataacatgtcttgtacacaagcacgggtaggaatctttgatatgcattctgaagcaggaaggttccaaagtgatatattacgtccactactgcaagcctgaataaaggtgacaatggtcccttaactatttataaaaccaacaaacaattcaataacatatacaccataatttcccatgcatgtgttcattttactagtttgcctacagagaaaggactac

SEQ ID NO: 5991 - DNA, 819 bp, Glycine max
agttgttattaatatgcacaacttgagtttggccttgatcagcagaggagaggattccagtggtattgcatttgaaactgctagagcctgtatttgtggcctagctgatgtttgctgtgttgcttcgtcggtggcgcctacatcagctgtaattagaggaatttgtgcagcagtttttcagaatgtgctcaccttttttatagccttatttgaaggaaaggatgtcttacagatggttgacaagaattttctgaatatgcaagatactcctgaggccttttctgagttgaaacaaaaggttttagatgaagatgaatcttcattgactaaactgtccaagttgcgtgtgttatgtctacttcggatattcttctcttgtccaaaagatttgcttgcagcttgtttggatctcttaggctctgccacaaaagagggaactaatgccgaaggacagcattttctgagcctggtgactagcacatttgatgatgataaggcagttcatcttttggaaagagcaattggtggatctaaatcatgtacagattctactgggtcaggcatcagagacaatgaggctggtgaggcaattatgactgaagacaaacatgcttctggtggtgattcatctgttggcaagagctgcttgcttatgcaggtaatacttcataatttttatcttcttgggtggatatcattcatacacagtatatgtttatatatttttgttctgcactatagcctggtataacaaattgcatacatagacttttacgtttattgggaactttattattactctattttgaggatggtatc

SEQ ID NO: 5992 - DNA, 1016 bp, Glycine max
  misc_feature (887)..(887): n is a, c, g, or t
tcgacctgcagtagttgtatttttgaagattaagaaaaagagcattctctctaaaacttatatgtcattgttctttttaacaattggtatcagagctccattgtaggggcctgatattgagtgcatgtgaggaaaacagtgagtgtgtgaggaaaacagtgagtgtgagtcaagaaagaaactgcagtttttctttctttcgagtagaacgagttgagaagaatggcagaaggtgggagtagcagtttcgtgcagcctgcaattccaaggtttaatggtcattatgatcattgggcaatgttgatggagaattttctccgctccaaagaatattgggatctcattgagaatgggatattgatggtggcagatggaatagagcctacggaggcacaatgcaaattgatcgaggagcagaagttgaaggacttaaaggtaaagaattaccttttccaggcaatagatcgtgaagtccttgaaacaatcctcaagaaggacacggcaaaaaatatatgggattcaatgaagcaaaaattccaaggttcaaccagggtcaaaagggctcaactgcaagctttacgcaaagattttgagattcttcaaatgaaggaaggagaaacagtgaatgcatatttttctcgtactttaaccatagccaacaaaatgaaggctcatggtgaaagtatgagtgaaacagtcgttactgcaaagattttgagatcaatgatctcaaaatttgattatgtggtatgctcaattgaagaatccaacaacttagacatgatgactattgatgagttgcaaagtagtctttttgttcatgagcagaggatgagaaagtcgtggagaaagagaatcagggtcttgaagatctcccacgaagacanagccagtagagggagaggtagaggtagaggtaatggttcattcagaggaggtcgaggagggggagagaatcattcattaaagctgtattgggatgtttcaatgtcacaaggtaggacactatcatattg

SEQ ID NO: 5993 - DNA, 847 bp, Glycine max
  misc_feature (815)..(815): n is a, c, g, or t
tgtaaaaagagtactactgtcatttgttaaccaactttccagcagagcgtttatcatatctgttagcagttagcaggcatttctggagctttatttatttattatttactgtaatgcgattgaaaagggcagagaaatggatatgcatggaagaggtaaaggctgtgtgaggactgaggagagatgctgtttgaaaggatagtgaaatgaagggttttaataaatcgttgtggtttacgagctttgagcctgagcctgagccacgtgagggagttgactagtaatagactggtctgacataaaggctaaccaaaaggggacttagtggcatgggttactcgaatcaatttatatgcaaatatctgttatgctttgtagtttatgcaaaatttatgtcatacataattgtcattcttaagggtataaggtcctccaatctttgggcttaaaaatgatgaaattgtctataatggtatccccctaccctacctcaagttgggtcttcttcatggctcaccaaaccatcacccttctttacacccccagggcaaaatgcagataataaaccaaacatgcaggatgtgttgcaaataaaatacagaaacactgattttttccatgcgtaaagatgcaattccacgcatctagggcaatataattaaagtgttccggagtaaaagtatatatgcaagcagattgataggcagtcaaacattaagacacatggaattgtatgatttctaagagtttctggtcattgacatttccattcagaaactatcgttattctcagtttagtattggtcaatacaggnctcagtgcacctaaaaaagaattcaacctact

SEQ ID NO: 5994 - DNA, 866 bp, Glycine max
gatcgacctgcagcatgttccatctccacttccctagcaatgccttgttgaatatcctgatttcttttattcccaagccacccttttcctttggtagacagattgtctcccatttgacccacgcaactttcttttgattcggccctccaccccatagaaaccttcgctgaatttggaccagcttgaccgccactttattgggaatcctgaaaagaaaaaaaaagaaaattgggatagatgttaggattgatcttattattgtaggtgacattgtaataacaggtagtgatcaatacgacattacaaaattgaaacaagcctctgtcaccaattccaaactaaagaccttggtaagcttcgacattttcttggtatcaaagttgcccaatccaaggatgttgtggttatctcttagaggaaatatgcccttgacatcctagaagaaacaagcctgtcaaatgccaagccaatagacactcctatggatcctagtgtcaaattgccaccaaatcagggggaaccattctcagaccctggaagatataggagactggttgggacactaaactacttcacggtcactcgtcctgatattgcctttgtaatgagcgtggtaagtcaatttctaaactctccctgccaagatcatttgaatgcagtcattcgaatcttgaaatacattaagagatctcttggaaaaggtctcatttatgaagataaggaacattctcaaattattggctattcagatgcagactgggcagggtcacccagtgatagacgcacattaggatattgtgtattgattgggaggaaacttgatatcttggaaatgtagaagcaaagggtgtagccaatcaaatgta

SEQ ID NO: 5995 - DNA, 783 bp, Glycine max
attgagctttgctttggtgtcttaaacttacgtttgaccaatttcttcaattttactttttctacgtaaaaattacaagtaaaaataaaataaaattcaacatttaaaaaaaatatgtgtcaatttcaccaaattataatttttcctctcatctgtttttatttttaatgtagataatacacgataaatgtttttaaattttaaactaatgatgtaaaaaaataacaagtaccaatatattattgacttaaatatatttttcatacttataatatatttctttttaaattgttatttattaaacaattattttgtcacttaaacttttcaaatttttatatttgacatctacatgttagcacaacttaattaagtggtgacatgattaatgaaatgccacattactagtgtcatgtgcctgccacatcattttttaattttttaggttattaattattttttaattagttaaaaaaacatgtcattagagttggcttggtcaatgctaaaattacaaaaaaaaaaaatcaactctaatttgcacgggcgatcttcactatctttgtgactccatgttcttctccaaacatgattcacctggttttcaacgacaaaaatgagcgaacaagtatgcatctttgtttgtctagagaagagaaacaaaacccctcgatcaatcttctcaaaatcagtttgaaccactttaatattttgggaaactaagaacgaaaatctttgtggatctattgacatgtttggggtggcggtgcacaactttgtgca

SEQ ID NO: 5996 - DNA, 887 bp, Glycine max
ctctaggatcgacctgcagcaacgtgcttatgaattgcaagcctttataggtttggatgtacaagctgttgaaacaataatgccacgagatgcaagttgtgaagacattgaggttattgctaatatagaatcttctcacctagaattatgatattttttttaatcagaaaaagtaatattgtattatatataaatcagtacaagttgtactgtgaaaattacacttgggtgccaaatctgatattatcatattacatctatgttcatctagaattatgatattacatctgtgttcatctatttgcacacttttatggtgtttaatgcatgaaacaaaagcaaccaaggaaagccttttaaatgaatgaaatttctctttctttggtgtttagtgcatgaaacaaaaactagtcaaggaaagccttctaaaagaaccaaatttcagcatccactagtgtagcatttcttgataagattttcatgctttttttctacaagtcatgtttttcagtaactgcaacaactccaacaatttatggctattctatgattgataggtgtcatggcttcatctatgtgactagaaaaatgcctagtttgttcttaattcattaactagataccatccctctgcaaacatcataagaaaaatcaatcaatctgctaaagtataactttctacaactcaagacttagtttctagaacagtgttgaaatttctctcattttcttaatgtcttgatcattttcactgggctcttattatttctggctcattatatgtctatagaaacggatccctaattacatatatagatagcatcttttatgccctgatctgaaaattaagttattcaatgggttgcatccagactttgatttatcag

SEQ ID NO: 5997 - DNA, 655 bp, Glycine max
tcgccagcttgctgcctgagtatgattgaaccttcattgcacaaaggttgacttaggatcgtctaggattaaaccttgatggaaaatgcggaaattgattaaggaaaggatggaaaataaggtggttaatttcgtgggtcttaataaggtggttcttggcataaaatggaataatgagatgagaaaacgtaggttaagtggtggctggacagaaatataaaaatggcaataactcaagctacaggactccaaatgaggtgattccaaaacgaggtgaaaggtctcgtcttgaaattcaatttaggctcaagaataacttaatttgagtgcataaaacgggagttatggccacgagataattctgggcagaagtggattttctggaattgtgatttgaaagaacaaggttgaagatgaaaggaaggaaagaatcactctttccggcgagggcaacacacaaaggttgtgaaagtcctttgatacagccagggtgttcttgaatcactcaagaatttaggagaatcactctcactaagataaaagagataaactttaattttctgaataaaactcaacttgtgtttattgataaaatgttcaggttatatagaagttttacaacagattttagtaatgacccactaacctagaatta

SEQ ID NO: 5998 - DNA, 906 bp, Glycine max
gaattgcagaggaaaggaggagaaaaaacaaatattccaattcaactttcatcgttctaaatttgctgaaatatgctaaactgagaatcttcaatcaaaatcaaaaattctgtttccacagagtcgagaaggagaataaaaacatcaattcattggcacgccggtcctttgaatacaattccagatgccaaagaaataaagtcgaaatggaaaacgaaagggcacgcaaatgatgattccctttaactcgcagctgaagaggttcaatgaaaattagattggagcgagaaatagaacaagaattgaggttggatatcagagatctgaggaagagtgagttacctagcgcgtcgattggattggattcgatttgattttgatttgcggttagagaagcggttctagggtttggaaatttagcgagagagtgaacagcgaaggccgacaagaaacggcgaagaagaagagagtgagagagcaatgaggatgaagaggcgcgtgttcatagtgagcgtacgctacaaccaattttaatactcgacggattctagggttacgtttctcttctttctttggttttctttttttatttgacttatactgcaattattattttgtttcttccagaatttttcaacggttttatcatttagaccacatgtgaaatcctagcttctttacagagtttcctcttcttcttttttttttttgaaaggagcttcgcacggtttcccttggttcaagggaaatttagaggaaataggcatttaaatttagtagtgacaaatggctaggggtaggtagaattcacccccaaaaaatgggtaggggtagtcgaatcgccttcatttatttaatagtaattaaatgtaagaatttaattttaaattttttaggttggataaa

SEQ ID NO: 5999 - DNA, 814 bp, Glycine max
  misc_feature (769)..(769): n is a, c, g, or t
agcttgcatgcctgcagtttctgaaaactgcgatgaattgtgtggtttctcgccccaaggatagatggtctatgtaccaggtttataattccttaaagagcatatccaaagaccagagtttctttgaacatgatgatgaatttcccttgatctttggtaagccagaaaacgaggttgtggcgtagttcttgaggaagcattgcagcatgagaagatgatgagagattgttctcactgaattgctattttatagtggagagttctcacaatggtgttaatgtttatggtttgagcatgtcaatgggtgaccctaatcaggtatagttgtattgtattgtatgatatataataaactttctggcaggttaggttttttgagatcttatctgtttcactgtttgttgtatgcaaatgcaatctctaatgatgtccaaagtgtttggtatatgcttcggatttgaatcctcaaattatatatatgtcttcaagacaaaaaaaaaaaactgggcatctacttgtgctctgtaaagacatctcaccatgatgttttttattcgtttagatctaattgttggaatgtttgaaacatttaatttctgtataaataaaaaactaggtaagcatttgaaagtgtttacgggaaacttatttgaggttatgaaaatgatttattatttctaatttatagttaactgtatgacataaatttccatgtaaaaagatcttgttgaatcagcacttaattaaaatgtttatccttaatgcatgntatatggtagtgttatatcggggatttgatctattagacaagttg

SEQ ID NO: 6000 - DNA, 875 bp, Glycine max
  misc_feature (809)..(809): n is a, c, g, or t
agcttgcatggcctgcagtatagtacgggggtcctcttcctctagcattgaggatgcatttgagatgtccacattagaagataccggcatttcctcaggatttaaaggagacccagacttcttcacaacagtggttgacggacttgtaactacaagcctgtttgcaaagctttcctgggaaacaggagaagcagctgctttacttacacgcgcctcttttgcaatattttcatctgctgttgttgagttaaaatttctaacatctacatcatccttggcagcttgtttatttaacttgttatggttcaatagataacagccagatatcacaccatgtttagatgattcaactaaacgaaatgcaattgattcactatcacagctcgtaacagcacaagacaggttagaaactactacttttgaaagtcgtgatgaactcatatttttttctgaatcagatctactacaagcaagttcatgcggagaaaacttcatacgtttgacattcacatcctcatcattctggtcttcacaaatgaaactctctggcacacaccccagagcagcctctttggaatgccgaattacattaaagtcctcttcttcagggtgtgtaagtctagaagatgagggatgcaatacaactgagttttcattactagagcagaatgatttaaatgtgtttttagcggattcatgttcaaagctgatagctacgggaacaagacacttctgattagactgaaaaatgccattaccagaaaagacctctgaaaaaatctgtctttcttcattagatccttcaaagntatcatcacataaatcctctggttctttgggtgatcaacatctctgctgccagtgcggttcacata

SEQ ID NO: 6001 - DNA, 816 bp, Glycine max
tcttcataaacagacctccttgttctctctctctctctctatatatagtttttgaaatttatagattactatattttctagcaaataaactagcttcagtagtcacagtacaaaatgtgtcattttacatatacatttccaaatctaaagaaatttgaaccatatcctaattagccaagtgtaacgcttttgattcatgaatgttttttcatcagcaaagataaaatatatttatgatgaggtataagagtacctcaacccgtatacaagtgtaacaattcttacagagcttttattcataacaaaggatctatatatatagataaaagaaaacccttaacgtttccagttaagtagtaccaaaatctaaattttatcaagtccaacaacactatctcagcagcatatccaacctaaatggttttatggtatccttctgatatggaaatatgtcaaaagctttttccatagaatcagaggatggtgcagctattggggtatgaatcataaactctgggacgatacatgggagctgaaggtggaaaatatgtggcagtggcacacattggacaagttggaagataggtggtacatattggagaaggtggaacatacgtgctattagtatatattggacaattaggaatatggtaattatcataatgaggttccttttgcgtgacttcttctgtttctgtttctgcttcttcttcttctcctcctccatcttgaccaccctcatctccttcttctaaatcttcgacacttaacaacgtagcgtaacggaacttcttttcaactgatttactaagcaaa

SEQ ID NO: 6002 - DNA, 926 bp, Glycine max
acccggtactttcctagagtcgacctgcagtttctggctgatgatagctatgcttctcatcaattttgcgaattcgcttatttagtgtgcgggagtagctgaacttatgttgaaatgagctaatctgttaatagattgatcctttaaccttttgtagaactcagaaggagaatgacgaatcctcgtcaaactggagcttcacaaaatcaagtaagttatatgatttttttgctgaacctggttcattgatactttgggttcttttgtttagttttccaagctggggactttaagagggaggtctctggtatcttattttgttaggtcctgtattccccttttaaacttctatgctcactatcttttagattaaaaaacttcgtaccccattgctcactatcttttagattgatattctaaaaatctgtttatccatcctaatgttgtagctagcttcaaaaggtgttgagttggaacgggaaattctcgaagcagagcactctttaattaatgataaagttgcacaattgcaggaaaaggtgaggatttaaactattaacttatgaatggatctatatttgcatctttttccttgaagagctatgatatttcagatgcaatgcttttcatgatttagtattttgcctagaatgttctatcctgaaatttgatgtctctctttttctttttctattaaatagggtttttccttgtttttaagttatattttagaaagcaattactggaaggataaaaaaattctttatacaggcatcattggtgtttgcattagtacagatttaaatgtattcatttaagttttgctttgtgcatgcaaagttaatatgatttccatttgcttttgaaaaatgttgatgcatttgtacatcaaaggcaggaagctagaagctgacattgaatgacag

SEQ ID NO: 6003 - DNA, 733 bp, Glycine max
acttaagtccttttactgagtttttaagaatgtgaagatatgctttgggttgtagttgatatgttggtcaatattttgcattgtttcttaaacatttgatagatagtttcccatgagagtttcagaagatatgctttggacttctccctatttggttgaactaattgtgatttgaatgtacaactactgctactactacatttctcctgcttaattgtttctgttgttaataagagctttaacataatcatacaggtttggcgtgtgaatggtcaggaaaagattcttcttccagccactgatcagtcaaaattttataatggagattgctacatctttcaatattcatatcctggagaagataaggaagggcatcttataggaacatggattggaaagactagtgttgaggtgaaatatttatagagctttgtttcacttcgttttgctcatgtgtgtttataatgatttctttcatgtaaaaagaagaaagctaaaaatctgacttcaaattattcaccttaagctgaaaactatattagtgaattacagctaatacatttcattacactgtacacaacattggtaactcttttgggaccagaaagtgttgggtaaaatgtgttagcctgcattccttacaagcttttttttgttgaattaggaagagagagcttcagctctttcactagcagcaagatgggttgagtcaaatggagttttctttctttcc

SEQ ID NO: 6004 - DNA, 802 bp, Glycine max
agagcataataattgagaaagtaagtgcatgtttagattcaccttagatcatacgatcatccaaaatcacattgaaatatcagttaccgtgatttaaataaatgttcacaggttttattctatcttgaggattcaattttaggtctagacttgattttgagttaaaacaacttcaggtaacttctattttgaatcaaaaacatttatactgagttttactgttaacttgcttttagaatataaacaattttgcaaaatcaatttcattcaaaattaattttgaaatggctcaccaaacaaacaggaaagctaccaatcaagaaaccgtcccttgacattctttcaacaaaatcgtaacctaaatttaacggtgaaataaaacgtgatctgccctaccaaaagagaacagacaagaaaaagaaagaaataaacattgtcgaattcgaaattcaattatgaaattaaaaacatgcgattcgaaggtgagaaaaagtagatcagggagtaacggcgagagcagttacctggaatggtagagatcgaagttgattggcgtaactgaaggttgagtgagattgtgtgattgcgcattaacagagagaagaagaagatcttggaaagaagaagcgaggaagaaattgctgattgagaacagaagaaattgaaaaatcgaaagagccatggcaagatccagaacagagtatgaacagattaaatttcatttcattttttatggtaatataatgttatgtaaatgtttgattttgatgttgatatcggtattattgatttagcttatcaa

SEQ ID NO: 6005 - DNA, 871 bp, Glycine max
caattgtctctgcataaaattagattgaagttgttggtgcatcattttacatgctaatgtatgtacaaaaattaaaataataataataatacagcacagcagatggtggtgatgctcatttataaagtttcttctacagcttggaaaggatcattcttagtcaccacaataaaaaaataaaaaaacagggcaggtttaactgcaaaagacaaggaaagaaaaataaaagaaaatgaggttatgtgatgaaaccaaatcctacttacataaacaagattcttacaatcattcatttcctaccttctcaaagctcggttatctttctttcaaggaacggttaatggattttctcaattccgaggagggccatgacgacgacaagcagcctcttatgggtgactgtagaaacagtgaagatgtggaaaggtgtttttgacgcattgagattgaggacaagcaattgaagccacttcgaagccttctcttttcactatcatgaggctgataattaggatcatgcgctacagcagaaatccttagtgcttcaggaagaatgcaattgcaaattgaacctgccacaaagagtagtcaacataaatgatattgggtatgattcctaataactcatactagttttcccctaatgtaccatataataatgtttggatttaatatggtccagattaaaacgtgtcatgtgctatcccacataatttttagacaacataaaaggcgcccttaaggacactaagaaaagcacttgtgcaggtgaagttttataaccaggaatgagaaaaattccagaaaaacccgtatcatcctgatcacttagatgaccacctaagtttggctctcagcataaattcatgta

SEQ ID NO: 6006 - DNA, 906 bp, Glycine max
tacgccagcttgcatgctctgcagatattttgatagcccaaatagaagcagaaaagcagaagaaagcgtctagcagtagcagcaatgatgctgaatccagtggtaaaaacaagaatgaaccaacatccaaaagacaaagactcgattaactcaacttgtgaagtttttttctccttggcttgtcaatagaagaatttattgtaataactcaagccatgattctaaaggttgacaagtttgttgacattgaggcattctgggtgtgtttcatgtgttcatataaatctgcttgtcattagtgaagcaactttacggcatacatgcaagaaaccctcaacttttttaggataaaaagtggctagttttaaatgaccaaatcgatttaaatttttaactttatatgctgtaaaataatagaaggttttgttaaaagctcatttagatatatttgttaaaaaaatatttttataatatactttagaacatactttccctaattttcaagaaaagtactaaatttttgtcttagtttttatttgaaagttttatctaattatcattttaaatttaaaatatatactaattttttttaatatatttattcgcttccttccatgtagattatatatagtgtttaaaatatatactaaatttttgttgacatttgtgcgacacgaatttttattttgttattagtcactatatctatgtgaagtttctatttatggaaaaaatgaaaatgatttaattaaaaatgaaatttctatttattagtcactatatctatgtgattttaattttgtttcttagttcttttccatttaaccatttaactgtgacttttcaatttcttcataagaaatggtgaaagagttataagacaaatatggattttttagaagaaaa

SEQ ID NO: 6007 - DNA, 859 bp, Glycine max
tacgccagccttgcatgcctgcagggattcgcctaataaggtccagattaaacccccttgttttcagtattacaaattttaaagataatctcccaacttcaatttggatcctggaaaatagaacatttcgttcttcctgttaatttgtggaagatgataacttgtataggtttcagtaaattaaattcaaatatttttggattacaaggtgtggagtattcattaatcaatttctttcgaggaacttgactatcctctttcgtcccaatcgtcaacaattttttttacacccaccagattaaaaaatttaaaaggctaaataatcaaatcctttcataaaagtgtgaagcaattgatttttgaaaaataacctaatttaaacttagtctctgaattgaatatgaaacaaataccacaagtttttatgataatttaatgataattggtcataaaaaaactttgtaatttaatatcaaactgatcttaaaaaaatataacttaataataaaattatctcacaaatttaatgaaaagactaatttattatattttttacatatttaaagattaaacttatatttttcatcttttagaaatcaatttatcacaaaattatacttttataaataaatttcactatttatccgatttaaaatttaacaccttacttaaggtattactcaaacatttggtattccttcaaagttcaaacactaatttgataaaaaaaaataatacataataaatatacatctgtcaaaatatatgatatctagggatgataatgtgtattgaatctaatggatacttataaaaattatcatgatgaatagagtaattacttactgaatagcatagg

SEQ ID NO: 6008 - DNA, 810 bp, Glycine max
agctcgctgcctgcagtggtgttttctcttccttctctctttcattttgacccttttttgtttttaaataacctgtattaattttgaatgtgataatactacatttctttgctgctaggtgtctgtcccccttttttggtctttctctctccttgctgtcattatttaatactggtttgatctttatatctttcactgatggtacttcaataattgttttagtgtattaatttaaacatgatgctaacagtcaatttgctatgaaaacaccaaatgctttcatggtaattctttttaaaactgtataaaatgcttgccaaataatttacggaaatgtatgcaacactaccccttatgatgtttttatcacaattttatatttttttattctaaatttgaaattcttatataatgaaataaaaacataaatttgactaaaaaagttaattaaaaatgtagtgtgtaattttttgaacaaataaatttaggtttcagtgcataaaattttgaaagagctatcttgagtccagtgatagaaatgagaaacatctgaaaaaagtgatacactcactcatttagtccttgcagtattgaacacttaaattcagtaagtgatgatatcttttgtttatgaaatcacaccctttgttattggttgttctgttatcatttcaatattactgattagtgttattgccaaaatactgtttgtttttggtcacataatttagatgatggttgaatcattttctacaataacttgcaaggtcatcattagatacagtcaaatccttgcatttaacacctaca

SEQ ID NO: 6009 - DNA, 839 bp, Glycine max
agcatgcatgtaagtaagttgatccttttggtacaaacttttgaaagtttgtagaaataatagtctgaatataacttaggttatatacgtcacagatttgtaatttaattcccaccatgtgatttttttaaatttattatttatagatagataaaaaatttaaaaagttattatttggttctcaatttcttaaaaattatttctttaaattaatttatttcttaacacgcacatataattaacaccgtctgtcgacagtattatatgatatagtaaagtgtaaggattactaatattatatttactttttgtatctgtgacagataaatatttttaattcaatctatcaactcttataattaatagtatcatggaattctcctagtttagcatcgccaacgaaagagaaagaggatcttcaaaaccattgcacgcataacattaaactaattaatattttaatataaatattaattaatttgaggataagaatgcactttaatttatgaaaatataattttattttctaatttaaagtcagcaaatatgacatttgactaatttaactgaagcgaaatataattattggaaaccataacattctctctctaaatttttcaatgtattattcctaaataatactcatcgacctttaaatgaatactgtgaattgttttatattttttaaacaacaatacatttttatggcaaatgctaaccactagttaagaaatttaaaataatcttttattggaaaatataaaattacactgcacagaaaattttttgtatttttttataatttacataataaatatttatatttaatttttttttaa

SEQ ID NO: 6010 - DNA, 843 bp, Glycine max
gaatttcatcaaatggtttctctagtctaaaactagcagagttagtcttactgatcttgctggacagaactagtaaaagaagctagctaaggaacataattttttaaattagtttattttctatagatgagagtggtacatattatcatgaattccttgatgattgtctaaatgaaaatgaaaaaagctatatcctggatggaagtgttggaattgtgtaattttgtcccattgcattcaggcataattaccaataggtctgtagatatgataatgacctttttactcattatttggtcatttcaggttctcaaacacttgcttagattaattgtttttgccaaactaggaggtattactttcattgtgaaatgtttttgtcattttagggatgtgtttgacttctactatcctttttgtgctcctgctcctgccatgtacaaaattgttaatatcacttgttgatgatttctctcgggcaagaacacttacatcggaaagctgaggttaatctcatatctctctgcttctcgtactataaatttctcctgttgacttgataggtaagcattaagtacttataatggtaattagtgtttgtaaaaattaattcagatcagattgtgaagaaatgtatatttttaaatatattaattactagtaattttttaaataaatttagtttattgtgaagccacattcattgacttattagtaatattaatattagtatattaataaattaagacatatttattagtgagaaaaaatatttcttgaatgaattcaatggtgttattttttggtaaatatgtacaagatatatatgagaactaaaaattg

SEQ ID NO: 6011 - DNA, 808 bp, Glycine max
agacatagcaccccaagccttcaaacgacatgagaattcatcagattagtttatggcaatgtcaaatgcttcaatcacattaatgctggaggagtccccttttctattgtttagcagttatagcctcaaccaattgcgtgctcgtataaaaataccagctaaattgaagtatgaaatgaatactttaggcatgccattttaccgcaaaagagaattttaaatccaacacttaccctaaagctactttcactactgcaagcttgtagtcagcatggaaacaatttctcagcccaaaagaatactggaaatcaagaaaccattcatttattagccatttaccaagatctatataggccagaaaaagacattatttaagatcaaggtgcaaatagcggtcagtacccatatccacaagaaatatgttatttggaacgcattctgcaagaaaaaacaaatcagttaggaacaaacattaaaaacttaaaattcaaaactacagcaaagtttttctcactaaatgaactattttttaattaaagtcagctaggaaatattatactatttatttaatagcaaatccgtcaacatatcttaaataatgtaaatgaactatttttttttaattaaagtcagaatataaaaattatttactttaaagcgctatttgaaactggcaaattttcctgatcatgcagaagagttttcaaggtaaacatatgtttatatcattagctatgttcatttgctttctggtaaagttgcattttcaattctaaccagaactgtatatacatgtggttggctggtt

SEQ ID NO: 6012 - DNA, 878 bp, Glycine max
  misc_feature (859)..(859): n is a, c, g, or t
acgccagcttgctgcctgcagactagatgccaatgtacaaagtgctgctcatctcttagatcaacttgttaaggtataatataataaatttctcctgaactccaacaatcctttgagcagatttacatgtgtgcacaactgtacatatcaaatgttttttgaataggtattgatctaatagtgatttgaattactgttccttttgattaactaatgattaaatgttaatttattcaaacagaatattgtgactgaaagtgatcagttcaggtgccccttcttctttcttctatgctatatgtttctctgtatgactgtatcctgttgtgttttaaatttaaaagacttgtcaatacagagatctcagactgatttgtaatgcttcatgcctcctccattttactctcttgattgtcagtattgaagaatttataccattgttgagggaccgcatgaatgtattgaatccatatgtccatcagtttttggtaggatggattactgtattggacagtgtcccggatattgacatgcttggctttcttcctgattttcttgatggtaagtgtatcagctaaagaatcaattttttttgtttctatgcacttgacatgttatctacaacatcaatgtaaaccagctaatcgttcataaacatctcaggtttgtttaatatgttgagtgattcaagtcatgaaatacgtcaacaagctgattcagccctttctgagtttcttcaagagattaagaattcgccagtaaggtttctactaatgtatcttttttccttttttgttggagtagcaagccttttgaaattattcataccacaattctgcttttaggggcagggcattgnttttactgttagcttcttg

SEQ ID NO: 6013 - DNA, 812 bp, Glycine max
tattcccacaaaagcataagcctttggtgaggttacttattcccaccaatatggcagtaaaaggagcttctgtcggcgagtcttcagaataaatatgctgcttattgagtagaaaacataatttcaaaattttaaaacttgtttatcttccattgaatgtggaatagacgatttgaactagttcctgaagaatattgataaccaacttagatctaaatatttttcatttataatcataaaataagagaatgcagcagagccaaatcaatttgttcattatggaacatcatcgggaaaaatggctaacaatggggaaaaaatggtcagaaactaattgaatttaacagaaaaatgtgtttaatacagttaactgagcacggaggtatattctctataagatgctactaagaattttccttctcagccataaggccattttccgtttcattaaagttgggtctagaaagttttatgttagcaataagagattcagcagcactacttaaacccttcctcccaaccaaactcaccccaaaattgcggtttaacattctcatcctgttctcatctccctccacctgactcaactcaatgacccgcttctttgaaagccaggcataaagataaagactgccagagtccaacacaactcctccaattttaaccctcagtaatgaactggaatcatgatcattcaaatttagatcaaacaaggcagagaagctcccaaatgtcagatcaggtttcacaaataatttgttcaaatcatcattcctcctggttgacactttttgttgtatcaatagtcatcg

SEQ ID NO: 6014 - DNA, 810 bp, Glycine max
attgcattttctctcacatatttttcttaattaaattaaaaaaacacacatatagggttccaatccaacccctagcattctctccgagaagtgggctttgagcttaccattgtgtcatgctacatgttgtgatatataataaatacacacataatatatatatatatatatatatatatatatatatatatatatataaaaagtaatttacgtatatatacatataaatttataaatgtatgtatattgatattaactattacaatttatacccgtcttgtcaggtatattatatatttcagtttttatttttttagtttatcacgacaataattttaaatttgaagtatgaattaattacattttgataattatattatattttttattgttttattatttatcaggttaattgattcaataagtgaccagttaaatcattaattcattaacccaatatctggattggattgatgatcaaattaatttttataatactaataactatcattatcattattatcattatcatttttgatctcactttatagttacttgtagatgaatatattttagcccaatttaagttaactcaccctcaacaactcataattggaggtgtaaaaataaaagactaaatcacttatttggtcatttattttttttccagtttaattctttttttttaattcaatttgatattttattttatttttttggttcaatttagtttctatctcttaaaaaaggtttatttgggccattatcttttttttttttcattttgatcttttaatcttattttttttt

SEQ ID NO: 6015 - DNA, 859 bp, Glycine max
ttcgccagcttgatgcctgaggtgtcagtaagttttttttcttaaaagaaaaatcctttattacttgtgaccaccaatgtcaaccatcatagaaagtaccaaaagttttaaaacaattatagatggtatcggtgtgagcagccttattccttacaagtaaatatgtaaactacacagtttattaaatgcatagtttaagaaaattacattttatcccacatgattcatgggaaaatatccatgctcaatctactggtagaataagaactgaacatgcagggaccatgcagtcttgagataggtgatgacttgacaaaatcaaaagaaggtgtttattcatatgaaatatatgagtggaaaaatgcttgcctctttctatgaattggctgctcggtaagagatccattaagtggaatactttttcactagccccaactgattgcatcaaattggatatattgtctcccacccaccaggtagaataaattaaccattcactgtataatataaacttggtaagtttctcggctgtgatatgacctgctagaatagacattcctccaaatagcacagcaataacctatgagatttaatgtttcaataaaagcacaagtcaaaaataaaggtttaactaaacttcaaaaaaaattattgattacaaatccaagcaaaatttcttccaagagtaaggttatagatttaaaggagaaaaaaagaaagaaagagattaattaaaatagataaaatatcatgatttttgaaacccttagctatacctgagttgaatgataaagaatgttaaagctaaaattccaaactccatatgcagcactttgtcgcaagcttatgtcagctaatt

SEQ ID NO: 6016 - DNA, 865 bp, Glycine max
cgccaagcttgcatgcctgcagaggaaaacccatattttttatggttagaagggacatatcttcttgctctagcggaaagattctattcaatctcttcttagcagaatccattattgatagctcatagcttccatgttgaacataggagagaactgcattcaaatttaattttgactctccggaagcactttttaatttttattcttatacctaacctaaaattaaaatgtaatttgactgagtcagcttatggcatatgacagtctaatgcatcttaaaaaatgttcaccatgcaaacataaccagaagtttctttttccaccaaatatttttcaagttgctgcgacaggtattgcgtctgatataataaacagaattttacattgggccagtttggataaacttacaaaaagcacttatagaaggaaaaaaaatagggaggtcaagtgaatacaacttttctcacgagctaaaatcaacatatgtacctttacttttgaagaagttagatgagagaacttttcaaaagttgaggtggataagttgattttaacttgaagatgaagttttattcattttacctttctccttctataagttatttttgagaaatttatccaaactgacccctaaaagggtggaattgtactttcaaatcaggggataaagtaataaatgatatagttatatcatacaagaagctcacctgaacagtatccagaattgattttttgacatcttcaagcccaccaacatccttccatttcacattcggaacctgcaaaagaaaatccatacttaaaaattctgggccttgtggaacatctaattacagaacacatctttcgcatatatatacatttt

SEQ ID NO: 6017 - DNA, 900 bp, Glycine max
  misc_feature (869)..(869): n is a, c, g, or t
acaagtgaaaacgatagaactgtactacataagataacgttcccacgcttataatgtgaaccagtgttactgtgtacaatttccattttgtacggcccgattcttttattaggatgttgctgatgtgatcccttgcatcacttctattctatcgacaatggagtcatccccacgctgctttttcaattattgtttctgggaacatgcgaatatctatttaactattcacatctgtatgcattaagttatgagaaaaaaaggaagtatatttacttacaattctttttaacacaaactaaatgaaaaggaaaaattgaagtttgtgataagatatcatatcagtgtgtggaaagtggaaacactaaaaaaaattattacagaatgtattataatggttttagaatatgatacttattcttaatttatcgatgcctccttaccgcactttatagtcaacaacgcgtaaactgaatattatattaaaagtgaattaagtttttagtcgtgaaaaataagggttttgaattttttatcctaaactattttcttaaaatatttgttccttaaataattttcattattataaatagtatctacaattaataatttttgttaagtgttgagttattatttaagtgatcacaaacatcatcatagattatagatgaggaaaataaattcttgttcgatgtcgtacatctcttcgtgaataattatcgtatattcatagatgtttaaagcgttagaatttaacaataattcttttatctttcttttaatatttaataacataatattttaattatttatttaaaacatataaatacgtgacatgtatgtgatatttatatttcatgatatttatcggntacagaaatgttaaggcagaaatattttttg

SEQ ID NO: 6018 - DNA, 803 bp, Glycine max
atgctgaaatcgagcaacggaatcatgaacactctggccacagagggagcgaacaagtacgacttcacagtgaagagtgaaggggaagacgtgagtctgaagactaaagtcaacaccgcaagcatagtagggacattgatagatcaagatccattcgtggcatataagataaacagggtgttgatgccgagagagttgttcaaggccagcgacgccctagaccaagcacctgcggaatcccctaagcctgccaagaggaagaagaatgctaagaagggaagcgcagattccgatgcggcggatgcaccggcggacggaccatccgacgactcggaagatcagaaggctgccgatcaggacagcaatggagtcagcggattgcacgtgagattggtcatggtcttgttcggtttaattatgggttttttggttctatgatatcatgtcgctagtatacagctcaaagcctcaaagattcttttctttttctctatatgtcaaccaaataaaacggtgccaccgacatctgtacctatttattgtttctttgttttcagtgtgggtagatccggtttgtgctacctgccagctgggatctgcatgtgtgcatataaacacttttcaattcattagatttagatattaattaatattgccctctcatgttttattggtattcttttttatgctgcctacttgttttaatttccacggtcaattagtagttcataataatcaatgtttttcggactcatcaatatattttaattttgtaagacattaagtgcagattttgtatcgta

SEQ ID NO: 6019 - DNA, 803 bp, Glycine max
tcgacctgcagaagtttaagctaattaacaaatggcgaacaaaagatcgtactaatcacaaatttggtccttgataggtgtagtcttcgaatccctttaaactatatatatatatatatatatatatatatatatatatatatagctaacatgatgtgatatgcatattcctccacataaacccggacgcatgctttgtacgaatagttaactaaagtaggcaaagttatatgttgctgcaactgacaattttaaacccttgattaattaaccaaattaggacaggaagaaaatatggtgactcaagtacgttatctatatatttatttataaatcaacttttgatagttggattgacttttcaaaattaaaaatagtgcgtgaacaccgaaaagtagttagataagggctctcccatatatatatatatatatatatatatatatatatatataatatatgtgtgtgtgtgcgcgcctgtcatttcaaaatgctaagagaagatatatgaccaatatggagtccccattgtaaattccacaaccctcatttgtctaaaaatgttttaaggtttttaaatagaaggtcctactcatggcctaattcattccgttttctttaattcttttcctaattcctaattttattatccatatttagacagcagaagaatgatctgataaccgagccactaagaatcaggtgacggcatatgtgtgcggtacaacaggcatgcaatgctagacttggtggaccaagtcactatgctactatgagattgcatatataagttgcaacgtata

SEQ ID NO: 6020 - DNA, 819 bp, Glycine max
acattgaagaatatatactgcctttgcttcttggaattttatagcttttacgacgtttctttttatttgctttaggcaaaactaattgaggctaaagttcggttctattcggacttgaaattttttatttcatttaattttctaattttttattttttttctatctatgtttcttataggatgatgaaatcatcttgggctgtttgatcttttatgtttaagccatcaaatataacaaagttttagggtaaaggtcttgtattgatggtgagaagtaacttcaaagaaattcaatcaattgttactagaatcttttatgtattcttgaaacattgaaaacattttttttttttatctattttgtgtacaaactttaaaaacaagaaacacattaaaaataaggtggtaattttgtaattaaaaaataaaaacaaaaaatagaaacaagaaataaaagtgtaaataaacactccattatattttcataagaatggaagttactttctaacataacttctttccttcccatttttctatcttttttatttattttttaattcaaataagaggagagaagtagaaaagaaaagataattttacattattcaaataatagggagagaatcggaaaagaaagaaaaataaacgtgagacttacttaaaaataaaatctcttctccaatgaaaggaaaacaaaagagaaagagcattattgcttgaatttactatattaaaccttgttaacaaaccaaaatgctttgttccatttttagatctttatatttttaagaaaataggttttccttaatctagcttata

SEQ ID NO: 6021 - DNA, 834 bp, Glycine max
  misc_feature (817)..(817): n is a, c, g, or t
tcattgcatttgtcttgtactctatgctgatgagattgtcaactctagtgatggtgagactggtatctagcatctcaaagagcatgcctctcataaatttcagataaaaagatttgggtccttttaaatatttcttgagaattgaggtagcctagtcacattttggtttgttattactcaacatgagtatgcattggacttcgaagagattagtatgcttggctgttgtcattgtgatactcctatggattgtaatgtcaagcttcttccaggttagggagaatcatagaaagacacaagaaggtattggttcctggtaggaaaacttatttttctcattgtcactagacacgacatcaccttcgctgcaatttggtgaattagtttctaaatgcccctcgtgacattctcagacaaaagagttacttctgaatattgtgttcttgttggaggaaattgaatctcatggaggagcaagaagcaagacctagttgaaagatccgttgtaaagttgaatatcatgctatggcaacaattgtgtgtgagcttacatggcttaggcaactattgcattcactactccaatgccacaactaaaattgggggacatccaagagatgaagcttatctacaacaatctagatgcacttcatattgcatcaaactcagtcttccatgagaggaccaaacacatagagatcaattgtagctttccaaagaaatcacaactgttaactctagtgatcaaccgactgatatgttcaccaagtctcttatgttcttaggttgaatatatttgtaacaaacttagcacagntgacatatatgttctga

SEQ ID NO: 6022 - DNA, 825 bp, Glycine max
atatacttacagttgttggtgctgttatagtaggatatgctacatgtatgcttcagcagggatttggatcctcttttttctcaaaaacggtatcttttgcttcaataggatttataaaaacagaaatttcaaaattatgacattttgcctgttgtaaccatattatgtcagaattattctgttttatcttggatgcttactgcatgttgttgagccagaacatgagctcaaatttacttattcagtttttaaaatcaagacttcgaatttacttattcagtttttaaagtggaatattttatttcctttcttttttaattgtctttttacttgtgaggatgtgaggtgcaaaaggcaggatcaacccttcatttaaaggcctgtttggtttaataattttttatttcctgattttataggtaatttcaaaaatatacattgttttttactttgttttctattttcaaatattagtacaggaaacaatgcagacaacaacatgttgtctttatcatatcacttttataaatctttaaaatcggaaacgaagtgaaaaaatgtagcatccttgaaattatatgtgaaaagaggaaatggaaacaaaaaacattttctcaaaacaaacagaccctaaatttcatccttttgctgtaaaatcttatttttctttgggctttggtatgtatattttaattggtatgggaggctgttcattttaagaaagtacttagcccttgctgattggctaatacactgcacaatgcagcagcaaccatcacaaaaacagttcaaaggggtagcaagcatgagaaacacatgccatcc

SEQ ID NO: 6023 - DNA, 837 bp, Glycine max
tctcctcctccggcgactcctccaccggcaactcctcctccggcgccggttcccgtgagctctccccccgctcccgtgccggtgagttctccacccgctcctgttccggtggcggcgccaaccacccctgtggctccctctccggctccgaagcataagaagaagggcaagaagcacggtgctccggctccttcaccgttgttaggacctcctgcgccacccaccggagctcctggacccagcgaggatgcttcttcccctggacctggcactgctgccaacgatgaggtacttcttgtctcttttgtacaatgtgcaatcagatctgagatttttttcgttggagatctcacattcatgagtaatataaacaaaataatgtatataagtgaaaaatattttaccatcgagtatgtgaatcaacttacacgaaaacatggatcaactcacatgaaattgtttaagctttttaaagcttattccgtattcttaaatttgagtgattaggttaaatattttggaagggaaaatttgtgatttaaaaaaatgaaaaataatttttcactatgagttaaattattgaggatgagttcggttgaaacccaagtactgaaactcgtttgaacttaactgagtttagggttttacacttttactattactacaccaaactgaaagtgaactcagatgtatgcttacgatgtggccacgcgccaccattgacgcatggatttggttacaaattagggtagccttttaaaaaaattactactaatttataacagtggagtaaatctaggatttttgttaatggtaatcaataaaatattaattact

SEQ ID NO: 6024 - DNA, 807 bp, Glycine max
agtgtttgcgcatgccttcttctgttaatcatgatctttggtattaatttgttttttaaatggcagaatcttttgtgtttgaagtttcactttgtaaaacgaagactgtaaaataagagtatccaaccaaccaaatttatgtgaggcttttgtttaatatacctcccttttgcttactttataatcatttcttcttcttctttcttcacagtgaagaatgttcaccggcagttttctgaaacatatgtcagcgatctttttatgcctataaaaggcttcttacgtaccacatgaatgagtgaattcaaattgtgaaacttctcttcctctgttagctagttttgtgtgcgtgagtgtgaggcaaattttcttcttctccatgttttatttgttccgctctacatgtttgtgggttttttagtttctatcccactgttattactaacgtttcctatctggaacaaagatgaagatgaaaccaaaatagagaagaaagttgttgaaacaagatgcgcgacgagtaagagcgacatggggggtgtactaatttccaggggaagaagaatgattgagtaattaaggtagtgcgcggcccaatttatatttttttctctttgaaaaaagaatttgggccgaacactatttatttatataaaagctaatgaaatttatttaatttgagtttactttatgtatattgccaatgtaaaattcttatagtaaatatcactgttaattatttgcctataataaattaggattgaaccttaattttttttaattaagtcaaacacttatttaagttta

SEQ ID NO: 6025 - DNA, 835 bp, Glycine max
  misc_feature (785)..(785): n is a, c, g, or t
taaaaggtgaattttgcaactcactaagcccatgtatgcagcatgagaaggaggacatccatggtcaataagccccaatgcaacttgggaacccaattttaatattatattatatgagacaagccacgagaaatgcatatattaagcccgtgccaattggttaagagctcaactgctaagacacaatgacagttcaaattcaatacaaaagcacacaaaaagtgagcatcacaaccccttatcacacgaccacatacagcactatattatgtgccatggaaaaagccccgtcaacatttactttcatccaccgcctgtctggaggggaaaacttgaagagactttatttttatccaaacttggtgttttagtgtagaaggatcgataaacttagaccaagtcatttctacacttccaaaagttatccaaggtgcacctaaagataaggctccacctcatttcctccttgcaatgaatcaaaaactctcgatcataggcagttatggtcaaggaaattatcggacaaaaggtgcccgacttgttcaacaaacgagcaatcacaaagtgtgaaaaatatctttagtccctcgcatataattaaaaatcactagcaaagaaagcatgtctatagtgttcagtattggtaaaaagtgtttcccctaactaccttccaaaagaggattgtcatacactcgggccctttccacttctttacaacgataaaaagattcaagaacatgctacacttttagatgcttattattttataaaaaaacatgaattgnttatttcttaagtttatttaaattacgattgatgtatattttggagtatc

SEQ ID NO: 6026 - DNA, 819 bp, Glycine max
gcctacttcctgcctattggtcccttcggcagaaggtaattcttgttgtctttccttttgttatctatttattatcccaattatttgagtgtattgtgatttatctgcccgcatacagaaattgatggaactatttaaaattatatattaacttgaatgttgaggataaataattctagatatttaagttaacacaacaaggagacaaaagatttggattctcaagaagtagttatatgcttgattagagaatattgcatctaaatctaattttttaacaaaataaattgactttgttaaatagattttgtgttgaaatggaacttgtgatttcctatttgcaggcatttgcagaatggattttgttcacatccagtggcattgctagtgggctatatcatgcatgtgacgttggcacctggtgtgcattgaactttaatgttttacaggttactgctctcttcctttagtggtctctcttacttgaatagctgtgacaagcttcaacattgttctgtgacctgagttccaaataagattctcattcttaacgggattattttatgctgtgaattactcccaggacttgggtgtcaatgatagtagcatgtataaacactcggatgaaaagctaaaatcacttagaatgtgtttagtttgcattttcattttctgttttcattttcaaaagattagaattataaaaatatgttttgggtttgacttcttgttttctgctttcaagaaataaaaacactgaaatgcattttcaaaaagaaatgtatttttatatttgcttaaaaatacattccttgccaa

SEQ ID NO: 6027 - DNA, 855 bp, Glycine max
accaacgaagatatacaagctaagagggatatccgttggtggtggaaattaattgcagaagaagagaaaggaagagaaaaaaaaataaaaatagatagatcttgtacaaaatttgtgaagaagatatctagcaaaacaattttttttatctttgataatatagcagtatacaccgacaattatctgtcatttcacatctaatctaacagtagatcgatccattaatcatctgtctttttttcctatcatgttaaataaaaaattaatcttgtttgtgatattatttgaacagttttcgcacatagcagatcaaacaaaagacttttcagtagataaatcatcctcatatcatgagcgcatggtttcgaattcctaaaccaatacgtcaacaggtcggatttaatcaggtgtcattgttatcatatgtgtctgcgactttttgctgtcgttcgaccaaccaaagcgtatgtaacagtagtattaattagtttcgtgagaaaagtgaatcacactttaatagctactttccttcgattccatagctcaattattattattattattatagtttaccgttaaaagaagcatatttcaatattagactaaaataaataaaaagcaaagaaaattcaaaaagctcaaacaaaatttaagctctaaatttcaaatttattaatctaaaaataaaataaaataaacaattgattaattgattgaggttaactttggttgaaaaaatataaatccaataactgaattaattataattgatttgaagctaaaaaatccaataactaaaaaatttaatgatatgacttggattcatggatgggatgtatatatatatatatatat

SEQ ID NO: 6028 - DNA, 838 bp, Glycine max
atccttcagattccggttgacacatgaaacatcatttgtgaaagctcacgcttctttttggacaagatattcaatcttcttctatatagtaagactcgttttactaatctgctatgttttcattttatatttggctgaggttgaggacttgatttaatcaacaagttataggtgcaagatcccatgccttttgttggaaccgtcatagacatgtaaatttgttaaagaaaaagaacaatggtactttagtggtattgtttgaggtatatagctcagaaaatttggatagtgaagtagaacaactaatggattcactactgcatttttttttatatcattagtaataaaatgccttttatttattacttgaattaagtttatcatgctctttttaaattaacctcttgtaccatgtcttcaatgttgccaatttcagggatgcttctttagacaattttataggtctgtaggcaaggctgactacttggctttgcgcaatggatttatcacggtgagtcctactccacaagacatgttctttaacactgaatttgcttccctcttttgacagtgcattatgtgtaggttcacctggctcctggaagtaaatttaacttccaaaagtatatcaaaagatccttggaggatgacttcaaggtagttgttggagtcaggtaacactcttctacacatgcatctgtagcatcttatcatctatgatttttccaatggtatcttgtttgacatacattctcactattttggtgacagtcctgtcctctgggcatcgtttgggtggtttttctgctcctaatgttaacggggagctactattttc

SEQ ID NO: 6029 - DNA, 839 bp, Glycine max
  misc_feature (732)..(732): n is a, c, g, or t
  misc_feature (815)..(815): n is a, c, g, or t
tgcttttcagtataaatgaaataaaaaaaatgaaacctctgtaactttttttaaaagaaattacttagccacactttagagtagtaatgttttttttccttattgtttttttacctgcaaccatagaaagcaatagagtagtaatgtcttggaacataatacctattgtagcaaaaaataaaataaaaaacattagataccaagctgcaatgaaaatgaaacctctgaagaaaactttctgaagaaaaagaaagccacttaatagacaacataaaactatcatcaaattttatttgctctatcagatgtgttttattaatagaaaagaagatgtataatgaggaaacataattaaacaaagcaaatcttaggaccttcataaattgaataaatcttatctaacaatcacatagtgagagcatcacttaaatagaaaatttgtagttaaaggacatcccatcaaagatattcaactggtttggaaattttttagattgcataatttagtttccaatcgccaaatcatcgtgtcaagaagagctccaaggcgatccccaaagctaagctacacaattgtttcttcacaatttgattcttgatctattagaactattggcataggaacactatcaggattgtcaccagattgatgcacagtaagaattatccaatcaaacatcacaaaaatatatgaacataaaagcatggcatacataaaagcaggccatatgntatgaataattaacaaaaactcagggttggtggcaaatacattttgtcaattattagcagtcattatctttagaccagcatanacaccaccaccaacaattaggggt

SEQ ID NO: 6030 - DNA, 765 bp, Glycine max
ggatttcggtgggagtgtcctcactggaataaatgggaaccctcttggggttcttgctaggcaattgggtttgcctttgcataaggtgagggatatttgccctctctatttgcctgatgggaggagtgttgactctgaggttgactctagggttgaggtttcgtttaacaagttgttggagagggtttgtaagctgagacaggcgatgattgaggaggtgaagtcggtggacgtgccgttggggacagcattggaggcattccgaagggtttataaggtggctgaggataaggaggagaggatgttgctgaattggcaccttgcgaatttggagtatgcgaatgcaactctcatgtcgaatttgtcgatggcgtattgggatcaggatgatccctatgagatgggtggtgatcattgcttcattcctggggggaatgagaaatttgttcgtgcattggcggaggatttgccgattttctatgggaggactgtagagtgtgtgaagtatgggagtgatggggtgctggtttgtgctgctgggcaggagtttaggggggacatggcgctttgtaccgtgccattgggggtgctaaagaagggggatattgagtttgtgcctgagcttcctcagaggaagaaggatgctattcataggttggggtttggggttgttgaacaaggttgcaatattgtttccttataatttctgggggtggggacattgacacgtttggtcatttgactgaggatttgagtatgagaggg

SEQ ID NO: 6031 - DNA, 849 bp, Glycine max
agaatgacataaggtgaagacacatcgcagcacaatcatactcctccagtgttattgatgttctccaatgagatctgggcaccagatctaccctcatttgatgggctagaatgtgataaaagaatatagaacacccagaaatgaaggcaaacaagatatatcaaagcccacaattttgccgttgagttccttttcagaaaaagtgctccagtcacaaaaatataatctagttgttgaagcaatgatccaagctgtctcttgccagaatgaattctggcttttagcataggcttcaactttgaattggagagctcccataatcctgattctaagtcacttgatgaagaggcaggattcatatttgctgcacctgatgctgacatgttctcatccagcaatcttgagacagcctgctaagttgattatgaaaattgaaaatcaagtatatcacaatttcaagaattagtatcatattctcagtagaaagcatacctcaattctgaatacaagacttgccttctcagaagagagtgactcaacctgttgacaagcagaataacgtttgaatgttgaataggtagagggtcagaaacacgcaaacaagtcaagtcccaatgctgtatttgaatgaattttgaaatattttctgttggacttttttaaactgatggattttgaaaactgcatccagttaatttgttgctcatttttggttttgactgcacatgatggattttaatcaatcagctaatctgttcagtcagtcacctgttggactgactgatcaaactggcaggtccagtctgaatttaaaacagggatccatgagcattcacacacattacaacc

SEQ ID NO: 6032 - DNA, 941 bp, Glycine max
tagagtcgacactgcaggcttgtggctgcacttaataactcatctgtcttgctgcattcctttatttcttttgtttaatgtatgatttaactcattctgcagtgcccttattgtaggatatatcgttttttgacaatgaaacagtaggtgatttgacaagtaggcttggggcggattgccaacaagtgtcaagggttattggaaatgatcttaatttgataatgcgcaatgttcttcaggttgatttagttatgatagatgtaatgctagtaaaactcatcttacatgttggacactttaattgggttttctcatcttgttaggggggaggttcattaatctacttgttgattttatcttggccacttggcttatcaacattggtggtatgctccatattagcagcagttatgttacgctatggaaggtaagctcttggttggttttcttcaaattcatcctttaagaacattagtttgcattgctagtgcatgcaatcgactagttgaggcagcatgtctgatgatgaaaatatcaaccagaatgttcatcaatgccaatcatgttgacttgttcttaactaattcaattagtagactctaaaaattgtcatttctagaaaatgtcactctgtaaaagctaaaggaatctctgccttctccccaaaactgtcttctactacagtgttattgagatatttatatatttgtaaaacagaaattttgatgcttgagttcgcttataggattctacctcattccttgtttgtcttctttatctcactggtattgatttggtcatatatttctgcataggtaccagaaaaaggccgcaaggttgatccaagaagtcactgcttctgcaaatgatgtagaataagaggccttatactataatttgttttatatttcctaaatgccattgtgataacattttctcat

SEQ ID NO: 6033 - DNA, 854 bp, Glycine max
acagttcagaaggtctgccttcgactatcagacgctgttttagccacgaaataagcatgggggctttgactgaagagcaaagggctgaaatgctattccagtcactgcaaagtgtttccggactcctctctaatgtaagtgtgtaatggagcttcatcttgtgtttatgtctacttttttatttttatttttctctttttgacaaaatctagatcaagtttcttatatacgtgccttcaagttcgcaaatcaaacaatggcatatgggtgtttcttttgacattgaacaacttatattaagaaaataagttgtcatttcattgtttgatttgagaatttgatggaaaaggtgtaaggaacttgatttaagttttgtcctttctttggttaattaattgactagtaacagatccttgtgatgacatttctctctctaaatttcaaaacactgaacaaagaaattccttcaaagttgagagtgggagtaagatggtgccttgtgattagtttggaattctaattttcatctctcagctaaaaatataacactagacttttaagaaagggaaaaaaacaataccaaatgttgggacatgctctgtataagagtatagatgatatatgcaatattcttcaaatttttaaggcacttggctacaatttgtgctcctgaatccttcatcattaaggtttgaatgttaagcctgactgattacattgttgcttcttgcagactaattcagaagctttagtaaaagaaatagttgggcagacatctggttacatgcccagggatatatgtgctttaattgctgatgctggtgccaacttatttcccagaacatgctaagtag

SEQ ID NO: 6034 - DNA, 813 bp, Glycine max
tatggcttgtaattttatttttttgcgtttcagtggggtttaaaatccaaagacgagcttcgggaacggcctgctgcaatccttcatcagtggtgtcatcctgtgccacattatcagtttcgttgagcatcgtttggtctattgtgcaagttagtacactgaacttcatgaaaccccctatgtttaatttgagctttagatttgttgtctccatccttagttgtgtctataattgaataaactcgagaataaattatatatacggttgttgttagcagtatattttgttctttcttttggttccttaccaatcaaccctttaggatatgtggaatcaaaaaggctgaaacaaagaatttatttattttgatccctcctctgttttgataattaatttttgtttttaaataatgttcttaattatgttatctataccactttcatcttcaccttttttgttccaaatgttatctatgccactttttatgtaataaaattgattggctctgggaggtagagtgaatgtgaagtcaagaaaaaaaaaataagaactacaatataatattaaataatttaaatcaaatggttttaagatttaaaatgcactacatattataaagaattcttagaagtgtcttctcttttttgtctcctgtttgattaggaccacgactaataggggaaaatgctcgagcaagttagaacttgaaagcatttgaaaatttgttgtttcaatgtaatagaggctatggttgggttattaataaaaagacaaaaagttgataattctaaactcttttaaattgagctatg

SEQ ID NO: 6035 - DNA, 855 bp, Glycine max
agcttgcatgcctgcaggaagaaaactagcataagaaccttgacatgatttttacaagattcaagattgtatatatagcagcaacacaggaataaaaaatggcactttggtgagaaccagtaagttgagttttgaattcattttctgcattacatgaatacttgcaatctgagtcacacaaaaaaccagaaacatatatagatagagagaaataccagctttgcatagaagtcaagtacttctgtcctgattgaatccatgtcccctttaattacatcaggcttgtacctgatagaaatctatcaagttagataaaaggaaatctgcaaccctaaactgacgatggcaaaccaggctcccagcaactaacaacagcaaaacactgagagtagtacagtaaacaataaatgtgacaagttttcagtctaaccaagtcctccaacaattagactgcatagactagaaatggaaataaagatcattcggggagcttgtgccattgacatcatcaattccaaaagcgaaaatgtatagaagcatgttataacttataagaaaagttagaccagttaactgaaagatattgttgactaccactcataaatgaaggatgcgactttccacatatatcccataaaaaactaataattccacccgcatacatacaagtgaaaacataaataaggaaatataacatggttgaatatctttataatatgataatatcagatcaaatgcggcacataggaattccacgacaagcagaaacaaacaaggcactactaagcactacctgtcagcaaggaccagaagtaagagtgacatatcattgtatctatcgagcagattattatg

SEQ ID NO: 6036 - DNA, 846 bp, Glycine max
aggggataataagaataaaagaaaatactgtgaattaagattaatccaccaactgtctaatcaaccttgtttagttatgacaaaaaacacatacatcctaaccctaactctttcaatcagcatttctctctctaaaatttgtctccaaatcacaaacacacccattccacacacacacaatacaaatattaattgacctttcaataaatgagtggtccctacaactccttttgaatctaactgactcattttaaaactcatagctaattgtatctagttgtgtagcaatcaccactactcaaaacaaaacaaaaaagaaaaaaataaaaaagaatgaactacaaagtaggggttcagttaaaccattcacaatcaacattcttatttcaattcaaatttcaaaataaaactcagcaagtaacggcaacatgccatgtaacctgcgcatcaatcccaaaccctatgttaattgtcgcgtgtccagaacgaagaagaagaagatgatgatgtatcatatggctacacactctctttacccaaacacgaacagataaacacgcaaaccaagggcatggaaatcaaactattacattatatatgcaacaagtcaggcaaagtataaataaaaacaaataataatataataatatacaaaagctgaagcatatagaaaattgaatcaagttcagataagtttgcaatgtaactgaaatttctcctgatgcgttaatcaatcaatcaaattattcttcgcgttgtaaaacacgtaagaagaagaaaaaaagatgggaaaatgaaaaagaaaggaaattgtgaaggaattgcaaaaagaaaaaaaggaaaagc

SEQ ID NO: 6037 - DNA, 892 bp, Glycine max
gccaacttgcattgcctgcagcaccagaaattagcaaaaaaatgttaaacttgaaatatgaaacgaatatttaccacaaagacatcatccttccaattaacaaagataagactcaccccatgcagaggaaaatctgtttcagctgagcacgtacctgaaagtagagaaatttcagaagtattaaacacatgatgtattgtttttttctcttttgagggatagaagcatcattactaataacaaaagtctcattccattaggaaaggtcagctaaattgatcaaacattgtcgtcgtgctctataaaaaataaaattggaatgacacaaataaattgtcagtctacatcatacagatttgacaaaattttatgttgccagataacagccaagcccaatcttccttattttttgggctagggatcagcaatgtaaagtgtggcaatgaagcacgtcataggtagagattttttcttttgaataaaagctacatcttaaaatcataatgcacaaaggtacacaaaaagtactattaaacaaacacaaagataaataaacaattatatgctttaattaacataaataggggggtgttgtaaaagctctccatgtaaaactgcaaacttaaacatgtaaaagcacactttgttcttatagtataaaattttaacatttgtttaatcttttttttattctgaatatttgtttaatctaaaaatcgaatgctattactgttacaatggggagtggggaaaataaaaggtatatctccttgccttcagcaatggatgaagactgccaccctcaaagaggttgacctttagcactattaattgtacttctttgaattcaagttccttcccctcaccacttgacaaaaaaaataaagtcagt

SEQ ID NO: 6038 - DNA, 818 bp, Glycine max
ctctagagtcgacctcgcgctcacccaggcaagctgagacttaggcatgaagcaattggctcacctaggcgagccagagactggtgtcgaacaacacagtttggctagcgagaatcaatgaatgacagtcccctgacaaaattagggtataacacttcagatgaacatttctctcctatttatgagagttatgggcaaaaggcttaagatgggttctatttggctgacgggtatttgttcaaaaagggaaagctttgcatatcccaaggatccatcaggaaattatttgtgaaacagagccatgagggtggcctcatgggccattttgggatagacaagacccttgtcttactgaaagaaaacttttattggccccatatgaagaaagatgtccataagcattcactacaagaaaaatgacctaagcctacggacgcctttttgctacagacattaattagtgtaggtaaatctcaaaaatacttttacctacaagtgactaatgtaggtaaaactcaaccatttgtaccaaccattatttggtgtaagtaaattcattaaaactgaaaaaagacttctacctacaattacattgtgtaggtaaaacttcaaaaaacttgtgcctatggttgattagtgtaggtaaaactcaaaaggattactacctacaaaagcacagtgtaggcaaaaattctaaaaaacttatacctacaactacgtgatgtagataaaacttcataaaacatgtgcctataattggttgatgtaggtataccctcaaaagtcttatacctacaattgttggcgtaggtaaaact

SEQ ID NO: 6039 - DNA, 847 bp, Glycine max
atctttcaaattagttacacgcacctgaaagtaaaacaagtattagcctgactgtatgaaataatacaaatatattaccaactaaaatgcaaaattaattccacatggacttctataagcacaaacaaggaataaattatccattgggcaagcaaaataagcatgactcctgacaatcacaatatatattgtaacaaccaaataaaagctatgattgttcaggagtgccaggttgatactaaaattataacagtcagtcaaactatcacatcaataatagatagtcaccattttgataaaacagcacaaggaggaagcaacattgatcacaatcatattttgatggcatgatagctatgactagtatcacttgtgtgtctatacctggatataatacccaaataggtatagtcattcagcctttcataaaatataagaatagttctttttggacatgagtccaacaaattacaatgaataatatagaacaaaacaaaatagatatgtaagtaggtggattggattacaccatatccctaagtaggtgattattctttttactttgcagagcacaaacaaaacactactagcaaattacaacaatgaaatcctttccccactaggtgaagttgcctgcacggattaaatgatgccactgtgtcattaaattgaaaaaagtctgaacaaagcattctttatgaaaacacatgacatacaaaatcagagaaaacaggaggtaacctaccacacccttcacacaacatctgtttcagtatcattgttgtggtagacaacacctggacaatcaatcagaaagatcctctttgttaggggtatatactggcag

SEQ ID NO: 6040 - DNA, 836 bp, Glycine max
tgaacctgtgataaatgatgaggctactgaaatgccaaaggagtcggtggttgctggaattaatgctgaagataatggatatcaggattgctatgtaggcgtgcctgacaagttcgatggtgctgtgaatcaggcctcaactgttatgggctctgaaactgtcgccagtgctggtgaatctaattatatggaaattgatggatctcttgagcataaagcagcagtcaatgaagaaagctcaccaagcactagtgttcctgtgttggaggagcccctgaattttgatgcctttaattctgctgctgaacttgaggtatgttttcagtagcatcctctacttctgtctgtctgtgcggtaccctttgctattttgtagtttgtttcatatgttgaattggatttaaaaaaggcagtggctagggtgaagcccaaatagtgtgacacaccggtgaccactacttataaccagtagctggtgatgaccagttactttaaaaaattagttttgctagtataggactctagtttagaggtaggggttatgtgaaaatagggtttctctttatgtgaataggtcaagtctgtccccagtggtatttttttaaaatgcccattttattttgtttctctctttgatgtgttgaaacatatgatatggaccctgttgatgaagcaaggggagacgttgggatgggcgattagtatgggcatatacattttgagttcattcattgaaataaatccatactggggagtttagagctgcaaattctgacttttaagggattagttcagggctcattggcaaattgcagattacatctggggcattttat

SEQ ID NO: 6041 - DNA, 896 bp, Glycine max
  misc_feature (867)..(867): n is a, c, g, or t
  misc_feature (879)..(879): n is a, c, g, or t
ccggtttttcctctaggatcgacctgcagttcagacttcaacctttccaagccaagaacctgtcaagaccatagcaatggtaaaggcattaatcttcagagtctaataaacagtccataaccaatgctaatgcctaatagatggaggggatcgggggctttaggggccattactacaactctgttgatatatttttctgatttttccacaaacaaaaaatttagtcatccacaagaaatgaaaaccattgccatatcaccatcgtgcaatgcaactactataaatcatattacttaaaccaccttaaatggttagttagaattcttcaaaaaaattcaaccatggtaacagctgacttaattacacgtaatttactaatagtgtgatttctgctcatattcaaccatttagttttgcttgacttttaaatacggaaaatctatctatcaacttattttaaaaaaatctcggtggctttatctatataaccccctattattattatagtaataaaatgaaaatgagagaaaaatttcatctgctcttttaactattcaaaaatctgaaccatccgacagtagaaaattcaacatataatgttttgattatgagtatgagagggttctctacgctataactaaccagcctacccagtattaatagaatttttgttggctttgcaattaaactaactacaacacataaaatggactagtatttgaaagttctctttaaaaggctttctatccttctttgaactgttgagaggactaaagttctagctaagccccaatacattaacattgtattcagtttatcagttcctttgtttctgcttcttttcttctggttatcaaggatccttgntaattaccatanatcctgcttcttcacta

SEQ ID NO: 6042 - DNA, 937 bp, Glycine max
  misc_feature (722)..(722): n is a, c, g, or t
ccaagcttgccatgcctgcagataaataaaaaataaaatgatccagaaacattagcaaagtcataattatgtaatattaacccaaatgatataggggggtcttgtcctacactcaaatcagaacgctgtctatgcaatccggcatttttcccctgaaaatctacacagccgacttatatgtctaatgctcaggttttagtagaataagtccctccaaaacataaagttgttcttctaacattacacattctcatcgagacatcagaaaaacaatccctaagaagagagtgattcacggttgcacaagcaacaatcagttcctaagtacaagctggatattgaattgcgtgcaagaagcttggagtccatatcttcagattaccagtaagaaacctgccacaataatttgaagttctctattactacatgcaagcagaattcagtcagtctcaatcaagagcaaccacaataattttccaataatcagtgtatgtgctaaaagaatgcagtccaacaatggcaaaggtaaaagatttcacaagtgagacagaatacacaggaaatgatggagaaaagccatataaatcccttgttaagaatcttacataattctactatgtcaagtttaatatggactgcaaaaaaatgatgtttgttaagaagctaaataatattggagcagttaaaattaagtcatagaatgagacaaggatgggacacanatagagacctgcatgagacccataccacaaaaaacaataggaaaatatatatttcatagatcaaatagaagaccacatatcatcaccatatattttagacaatagacccactacatataaaattctgggtacagaaagcatgtcctcaaccatgctaaatctttagtaaaaataaatgaatatataatgggcagcaattagatgtcaacagtatg

SEQ ID NO: 6043 - DNA, 855 bp, Glycine max
tgtcacccgaaacgcaatgtcggttgagttcgcacgaaataccaaaggcaaccttgacggtaaacattttgagcaaaaatgaataagaaaatttccttgattgtacaaaaatactattggccggcgttggtgaaaaagaaaataactgcacaatgtcggaaaaaaaaaatccattcatgtgccaagatttccggtaaggtttgaccacaaaaatcagtcctttaaggtttacaatcgatgtgggctattgttttcggttcaatccctgaataattttttgatgatgtcgattaggaactgttcggttggttcatccggtgatgctttttgggatgcctcgaccgataatttttcttggccgatgtcgcataggattttttttcgattaaagtttgaaatggagtctttttggtgtggtggtcagttttatttttctttgcctattcaattaccgcagtccagtgtcacccgaaacgcaacgtcggttgagtttgcacgaaataccataggtgaccttgacagaaaacattttgagcaacaacaatgaataagaaaccatcctagatggtacaaaaaatattattggccgggcttggtgaaaaataaaaaaattgcacaatgtcggcaaaaaaaataaccattcatgtgcgaagatttcaggtaaggtttgtccacaaaaaatcagtctggtcaagattacgaccgatgcggggctattgctttttttttcaatccctgaataatttttgaatgatgtcgattaaggaactgtttgggttggttcatccggtgatgctttttgggatgcctcgactggtaatttttcttgggcgatgtcgcattggatttttttta

SEQ ID NO: 6044 - DNA, 1321 bp, Glycine max
acttctgttgttgaggattggttgctttagttttgtcaatcaacgtgtgagtttattgagtatgatggcttagatcttggtgtggtgtagtttagtgagtggcgttgacgattgactgttggggtctggtcttaacatgtgtctttgacaatgtaaaagacaatttgattttggcagtgtttgctaggttggtgtctctttaatttaggtgatagtttaagaatgggtgtgtgtggcaatcctgtctgtgccaggcaggaaacctcattttctttccaaacaaaagtgaaaataaaatggaaatattgataagtgttagtcagatatgtggtgttatatgaaggaaactatctagatatggaattaggttctttcaaggggagggaagattgggactgactgagtgtgtgtcctaatggttgcaaaagaggaatttcgtcggtgcttttgtatctgaattagtttgtggttcaagataatgtgaaagtttccttattattggccttattgtcttcctacagtggacataatttctgctattgaatttgacaagtctggtgatcatcttgctactggtgatcgaggtggtcgagtggttctctttgagagaacagatacaaaagatgtaagactattttttgcttatgcaagtgtttttgtgtaaaaaaaaaaaaccaaataggttccttgttatgcacttaatattgtaacatgtatgttttctgaaacatgcagcatggtggatcaagaagggatttggagaggatggactattctattggtaggcatcctgagttccgttacaaaacagagtttcagagtcatgagccagaggtaatcatcatttggtcagtaatgttgcaccaacatcctatgggtcagaagagtcaatatttataaatgtatgatcattgtttcagtttgactatcttaagagtttggagattgaagagaaaatcaacaaaatcagatggtgccaaacagctaatggtgccctgttccttctttctacaaatgataaaacgatcaaattttggaaggtatgaaatgaatgatcacctttagcatgttttcagtgctgtcatttatcaattcattgataaattgtgcacaagtttgcacttctgaggaactaagttttaccaattcacatgttttggcagttttctggttacagagatgtatgcttgagcccgtatatcttttatctaattggattttattggaaaggctttgccttctaagttaccaattatattttgaactgtatttattaatagaatgatgtaatgccactatcagtctgccatggtgtcagtct

SEQ ID NO: 6045 - DNA, 886 bp, Glycine max
agcttgcatgcctgcagattgaagagggcttagtccaccacgacacctagtaacccctccgacaacataaagcttgttgtttaatatacctgtcttgcaataggctctaccaactgacattggactggcctcagtccaagagtttttaatgggatcatactgccaaacatatttcattgctgaagctcttgaaaatcctcctaatgcatagatgcaaccatcaacagctcctatggagcaaccacaaaatggcatccagtccagggcatctctcctaccaagccagctcattatgacatcaacaattctgatacttggacccatcatgctccacatccgaaggggaaaggaaatcaaacctttctttgtttcatcttcaaacccaacttttggcattggcggcaacctttgccatcttctggaaagagggtccaatgcataccataaaagcttatcatccttgacctttgtcaaaatgtagagccattcctccatggttccaagctcttttctcacacaaaatagttcagaactaacaagggtttccttccaagcacggcaaactaacttcagattcaaataataaattcgaggaactctagctagaatctgtattgatatctcatcaggaagggacggaatcagtcttgcgttgtacccgcaagggtttggtgacaacctctgtctcttgcaggattcaccttgtaaaaccccgtaggaatccttccatctagtcttggaattgttcagattcagtatattccccattaagaccacttcaaattcaaacccaaaagcaagcaagcacatcaaacttccaagataaatctgtttcataacatcattttaaatcatctatcagtacattccaagaaaatgcgttgat

SEQ ID NO: 6046 - DNA, 889 bp, Glycine max
  misc_feature (855)..(855): n is a, c, g, or t
actctttcggccagcttgcatgcctgcagacttcaacaatcatgtaagtaaacagtctactcaagtagaaggtccaggaaaagctcaatcatttgcttcctcaccattagttgaaagtgagataacagttccttctaatgaattaagcctatcatcacctgtacaaatggttagttctagtgctagtgctcctgttgatgttgatttggatgaaattaaccacaaaggcaacacagctactgggcttcaagcatcacatgttgaggttagaggcagtggactttctgttgcagctgagaaaacatctgatgatggatacaattggcgaaaatatgggcaaaagcttgttaaaggaagtgaatttcctcgcagttattacaaatgtacacatcctaactgtgaggtgaaaaaactttttgaacgctctcatgatggtcaaatcactgagatagtttacaagggaacacatgatcatcctaaacctcaatcaagctgccgatactctactggtactgttatgtatattcaaggagagagatctgataaggcttctttggctggccgagatggtaataccaaccatctatcttagtttccattttattattacttattgcaaacagaataaactgaatttctttttcttctaattcttgaattgtagacaaagcatccactatgtatggtcaggtgtctcatgctgctgagcccaacagtactccagagtcatcacctgtagccacaaatgatgatggtttagagggtgctggggtttgtgtcaaacaggaataatgaaaaaggtgatgatgacgatcccttctcaagcgaagtatgacaatttggctgagcactggnacttctcagcatgtgtgctcacttgctgctgctg

SEQ ID NO: 6047 - DNA, 847 bp, Glycine max
cgccaagcttgcatgcctgcagttgtgagcataaactacaacttcctgcactatctgttacaattttacccgatttctctgacttggaagataaatgttatgcaaatcacatgtctatcaatatgctcttgattataatctaaccagactcatgagagaaccaaacatatgatacagtaatgtaggagcagcagccatgtgcctatttttatatgtctattaacagtttaattctactttacaataaacccagaccaattgtaaaaacagcaagtccagattgcccaaacaaagaagttagatacatatagttgattattcacacctcttccacttccaagatatttggaagcttttgagggaccttctcttttagttttaggttgattttcagccttcaagtgtgtgaatgattcaattgtcctccgcagaccctcctgcaagaaacattacaatctcattattatgggagaagcaccaggcaaaaagtaggattaatgaatacactcactgcaatagatgtaaggaacttggtgcactgaaatatcatccatttaaggaaaacatctcatacttgatttcatgatatatatatatatatatatatatatatagatatagataatcttaacttgttatcatcagtgattttgggggccttgagttagccaagttctcatgttttttatctttcaaaatatgaacacagaatgtccatgatagagcatatatattattacttttctgaaacgtcatagaacctgtagtgttacgatgggtgcatagccaaggcgatcctttgcttttgagcaatcaaaagttctgctgcaagatgtgagtcttattc

SEQ ID NO: 6048 - DNA, 884 bp, Glycine max
gggccccctctaaagtcgacctgcaggaaatcttggagtacaaagctggatgcttcctcatcaagcgaagaccttcttcaggttataatctggttcatcttgatagatcatgctttggaacttccagttggttgctaatggtctcaagttaagctcatctttgatcttcccatgtctgttgcagacagaaagactaactaatgctgtatcaataccctgtttccaatagtggggtagtggtaataattcaataaggagctggaaaatatttagataattaagaccaagaaaaatttagggtcgttgttctggttgaaaaattacattgtcatttgataaaacggataatgaggaaggacaatgctgctggtaattgtggataatagtcttcccttcaagtctttgcaattgaacttctaaggaatagaagttacttcaacagtattcttttaccaaattcaatgttttaaaaactaagcatgggattgaactggtgtgacctttgggtcatgatttgattgattcaactgtttgattttgtggttgaactggataatgttcaaactggatagccagatcacatctggactgttcttccagccagctggtgtaatccagttgaagatatgcctagttggctagctattgtgttagtctaaacattttaaaatttaatgttgatgctttgtagtgcttcttttctcaacacattgtttcatacaatcataccttattgctgaccatttaaggttttttgttgttcatcttaatgtgttttcttgtttactccttcatttctacccatgaaagtggaatatgcatagtttatcttgagctttttatttatttgttaccctgtactgatgtgtaggaatcatttcttt

SEQ ID NO: 6049 - DNA, 867 bp, Glycine max
ggaacatgggtggtggggccactcagctcataatgcctttggtttatgagttgattagaagggctggggctactcccttcactgcttggaggattgccttcttcatcccaggttggatgcctgtggtcatggggatcatggtcctaaccctaggcctagatttacctgatggcaaccttggtgccttgcagaagaagggtaatgttgccaaagacaaattctccaaggttagactctttcttctctatatgtttgaggacacaatcaatatatatgttgaattacttgagatgtatttggcttgtgaaaatgttttcagaaatcatttcttatttttataaataattatgaaattattacattgttttttcttatttcttttttcaaatatttataaaaaaaaagtcttattttcatttttttttgttgtcttaaatatttaaaaaatataaacgaaataaaaaaatcatgtaatatttttttatcatgaattatgaaatagataatgaaaacacaagaaatgctccttacttctttaccaggatcgtaaaaaattgaatcaggcaaaagtagggaaaatttttgggaagaaaaaaaaaatcaatcaattaactcatcaaccaatttggtttcattttgggtgtttaggtgttatggtatgccataacaaattaaaggacatggatttttgccctcctctgtgggtactctatgggagttgaattaaccactgacaatgtcattgctgagtatttctatgacaggttagttcagttcatcattgaggtcaagccctaaggccccatgcttaatttatgtacacatgtgataatatgatctccctcacaaagcactggggatacaata

SEQ ID NO: 6050 - DNA, 751 bp, Glycine max
gggggaacatgggtggtggggccactcagctcataatgcctatggtttatgagttgattagaagagctggggctactccctttacggcttggaggattgctttcttcgtccctggttggatgcatgtggtcatggggatcttggtcctaaccctaggccaagatttacctgatggaaaccttggtgccttgcagaagaagggtaatgttgccaaagacaaattctccaaggttagactctttcttccgtatatgtttgaggacacaaatcaatatattaaatttcttaagaggtatttcatatttggtttgtgaaaatgttttcagaaatcatttcttatttttataaataattatgaaattattgcattattttttatttattttctattttttcaaaaatttatataaacaataatcttgttttaactttttttgttttatatatatatatatatatatatatatatatatatatatatatatattcaatctttgaaaataaaaaaaaaagatgtaatatttttattattaattatgaaaatagaaaatggaaacacaataataaatgctccttactttgtttaccaagatcatcaaatattgaattaggcaaaaatagggaaatattttgggaagaaaagaaaatcaagtaattgattaactcattaactaatttggcttcattttgtgttcaggtgctatgggtatgccataacaaattacaggacatggggtttttgcccttctat

SEQ ID NO: 6051 - DNA, 848 bp, Glycine max
ggtcaaactggacgtaggtgactctaccgtgaagagtatctgccgcagaggaaaattgaaaagatggccccaaagaaaggttcaatgcttcctgcaacaatctcctttaatttcgttttgctagctatttgatatttgattttgctgtgagtaaatcatctttatcattaatcatatatgcatgcatgtgtctttgtgaccatgtgctcaggtgcaaagccttgccaagaaggtcagagtactcgaaagagcattgaattcgccagatccaggggtgaagcgaagaactctagatgaaatccgaagacttcagcaagaaataattgagaattgtggtggaattaccccaaccggaataccgatgctccaattcgatgaagaatgatggagagaggagactataatataaactatgttattcgaattaagttttcctttatttcgtacgaacgtctgattgtaacactgttgctttgtggcgggttattagatttcttttgatcattttgttgtttagtgttggttaataattgtatttttttttattcctgagtgaagtttatttgacgtcattatgatgagttacaaaggttggtttaattttatttattttttaataaaaaaaataacttcttggtaccaagacttttattcgcttgtaccgaaatttgcatgttgttgcaggctttgcagctgccatcttattatttacacttggtttgcatttcaaataatttcttacctattaaaaaggaaaaaagaccatttaatttctaatataaaatttgtgcaatgagttaaacgtttttctaaattgaagtttaactagaagttgacaactttgtcat

SEQ ID NO: 6052 - DNA, 854 bp, Glycine max
acgttctttcaacgaaccaacgtccatgaattaatttctttatagaatgtgaaaatccttacatgatactgtataacctttataaggaaaaagactatatatgtatggtaaatccagaaatttcacacccgaggtcaattatgtgtattaatatggtttagtttgtttcatgagtgattaaaactaattaaaagtaaatgaacatgatcattatgcaataattatcaatacatgattagtaatattatgaaattatttaccaccacacgtgattaactatacatgtgtaaaatatgattaattttattttaattataactgcttaataatgtcataggttttaatgatgtgtatggtgtttctgtcttttgtgggttttagtttagacttttagtcccttgtattgccaaaaaaatgtcataggttattctttttcattaattatattgaggactcatgtagtcatgttaattactacacttactcttaagttagctttataaaatatatttttctcttaatatgcaataagtataaagtggctgctcaccccattcaatcctatgattaagttaaatggtttatattttgttttttttttctgtggtgtttacgataataaagtaaaactgaagtgaagaactcacatctcacaacaatgtaagttcgattttcgttgtcgatcgtagaacattatcggtatacatacgtaaatacttctgtaagcgcattgaacattgagtcatgtcctggtgaggtcttgaaatccaacctaaacttttcattgagagaaaaaaaaactgaagtgaagacctacacttacaaacatatactgcctcgactgcatcatcagc

SEQ ID NO: 6053 - DNA, 862 bp, Glycine max
taagaccagctccaagatcaacccagttctctacagcacgttcagcctgatgtgaagtttcaattgcaccagcattgtaagattttctggcagaagcatgttttgatggaagcttctgaagtgagaaacaaaaagtcagggaaattcaaacttcaaactaaaaatacatatgcaaattatgataggctgattcccacaacattgcagccaaattattgtcttcttttcttaaatttcttatagaagcatacaaagattacaagtgttgtcatgctagagaaatccatttgcaaggcaaacctactgaaattcagattcctctccttgctctaaaaaaagaatgatataacacaccctacactctttattttgctaaactgaacattgtcctaccataatttcacagaatattacaaaagttccatcaagtgaacagataataagtttaaagttgtctttttcttttgaatcagttttttaatactacattcagttatttttcctccattcaccaaccatgttccccttgccataattttaaataggaggatggtccaaaatcttaaactggcctattatttgggtaaagatcagattgtgttgggtcaaagtcaaaatgattggactgcacaaaaacatattcccaaacctagtacattagtagtagtgtaccactgtacccttctgagaggagtgcaaccttcttaagtcattttctttatcctcacccccctcacctaagggcttttggaaggcctttcaaatttttttcattttaaatgatgtatgagcacaacaacggtatattttgttattttcctcaaacccttttaacattttcacaatagttcacaatcaaaga

SEQ ID NO: 6054 - DNA, 849 bp, Glycine max
agctgtgcaaagaattttccttttcgacaaatttcctgcccatatctattgttttctcttgacgttgatcattaaaatcctctgccccagaactggctggaaaggatgatgtggatgaaacgtccttattattagtttgtggtacagcattagggacctggtctttcctaggattcccacttttggatagacttttaaccctgtcaatataatcaaactgaatttacgtaaaaagggaccctgtttatgaaacattagtgttagagcagaaaatggggtaacacataccgatctgcgtatctcaaggtattaagtgtgtgttcacatgacccagcacctggagatatacaagagatcataacagtcttcgaattacccacaaaggagtcacgaagcacttctgtaagtttgcttccccgaaatggaatatggatctggtcattgtctaaagcacgaatgcactccttcaaggccaaaaggctcttattaatttccgctccttcaatcctatagcagacatacataaaaattgcagagagaattgatttgttaatataataaaatgtgcttgatctgaacaaatggaaggatgccaccaaatcttgttttcagcagttacatcaaaacagcatactagaatttatataacaaatagccaaggtattttgtacatttcatttatattattaaaagtgatccagcattatctatagttttacaaatctatccaagaaggaggccacccaccgattccctgtgccatttttttctgcttaacaattggggctttgatgtgatttgttgcaattatcggcattttaaatggagtattttgggctcaactgtgca

SEQ ID NO: 6055 - DNA, 843 bp, Glycine max
aaccatgcccagactaccaacgtatgcacgagggctttaagcttgcatataaggaaatggcaaagaattactccatgttttgggcactgcagccaaaatgccaaacacttgtgtggtggaaaacctgtgtgcgagattcttttgtcagggtaagctatatgtaaagtcattattgtggttgtataatgtattatatgtcgtgatagccaagtttttgttttacctgggcacacaaggaaaggtagcatatttagtttggttctaaatttgtcttcagcaacaatgaatgcactgaactaacaggtttaactccctcctttattgatgtgttcagctgcattataagctaccaaaatcgagcattgaattacaagttcatgatatttgcaatctcacctgttaaaatcatcgagaaattttgttcttctggcaggctggatatgaatatgatgaagagacatttgagaaaatcttcagacgtatatatgcatcctttggttcatctgctccgtatactgtatttccagactcccaaccatttcttagatggcttcgtggagagggtctcaaagttggtattgtgagcaatgctgagtatcgatatcaagatgtaattcttccagctttgggtttaaacgaggtaaatttcatttgtttttctaatagtttactatattacattgtttcaaagactaatcaaatacttaaccacgggggtggcatagtatctcattcttgaacatctcagtgcacctgttggaaacgttactagaggtccgcgcactttcattttgaaatgcaatgcaatcattaaagatttaaagtaatatattgactgcatct

SEQ ID NO: 6056 - DNA, 878 bp, Glycine max
acccgggttatcctctaggatcgacctgcagcaataatattggcaaggcaaggcatgtgtggcagaagagagaagaggtatgtgtaggcacaagccaacaatcacagtgaaagagagagagagaataatagtaataataatgatgcactatggatgaaaattcttataacttgcattgagtgaggtagagcttgtaggggaacacttcaccaaaccacgagagattttgctaataataaaacttctttttagtacgtacagtgttttttgttttttcaacaaaacttgcatctccttatcatgtttttagatttattgatttttgtaaacattaaattttctatactcagttttgtgtaagtgtaatattttacaatttttctgacttcgaaagttcgatcaaaatagttaatcacaaaaaaaaattagagaatggctaacaaaaatgaggtacaccatgtttttatactatcactggcagagaaaactcgtttattgtttttattttattttatgtcacttttcttataaaatgcactcaataaaacacacacacacacacacacatatttaggtaaaaaatattgattttgagtttttgaaaataatatatccgttatccagtatataaccttcaacgtggggtggattcttgtgtattaaataacgttcctctcgcactttattgttttacactaattttatattctttctttcatgattaaaaaaataaagtttacatttcttttctcaatttttaccatgaagtgtcgggtttggagtttgtaaagaagaaacaaagggaagtgtaaaattatagttactatatattttgggtgggccaattcactcaggttaaacttttttttttttaccat

SEQ ID NO: 6057 - DNA, 881 bp, Glycine max
  misc_feature (832)..(832): n is a, c, g, or t
atttaccagatttgcttataaattccttgaaccaatccgagtcaaagaagcctccaggtgcaatgactagtggcttaggttcaatccctctatatgcattttcaactatgtttcttaaagcagcaacatcagaagcatattgatctgctgcaacacttgctccaattccacttccacacaattcattgcctgcccataaaaaaagctcgttgtagtgtccatacacaacatggatttattcatcatggcttaatcaacaacacagttaattctaaagaaggaaagataccatgtttctttcttttagtaaaaaatatttgatagcatacaaatatttacataaaaaaattaaatgtgggatgaatggttgtcattgtcaagtgaactcatgccctgtgatagggataatgagagccttaatccttaagaaatcaccattttcaattctagtcttattgtcccagtaggcactaactattttggtatttgtaatgaggacaacatacacttaccaagttcccaaccatgaatggtgtacttctttctgactgtgtatcgtattaacgattcagcattggtgtagttccaaggtccaacagcagaaccagacttcatagattttccagcaagagcatttaatccaaagacaaccttagccctgaaatatacctatcattgatgttaaacttgttaaaaacacagttgccaaataaacaagacgaatctatttagtcctaaacacacacacatgggaaacaactcaaaagggaaaagtgattttaccctgctttttggaaaaagctgtttagctcatcccacctatacatcggtnagcacccttgagtgaaaaccgacatttcattcgcattcaaacaaaaaga

SEQ ID NO: 6058 - DNA, 895 bp, Glycine max
cgccaaactttgcatgtcctgcaggaaacatcgaatacatggagttaaactatatatgtaaatcagaatcttaggattctcaggagaatatcaataagtagatgcccttgttattgtctgcaactaggaatttattgtttaggtcctcaaccttaacagttcctagtttcatccattggagaaatgtaatgtgtctatgatttcatcgagcagcagttcagcccatttttcactcgtaaaatcctcatgccatagctgcaacaacactgctttcaagattcaatctcagtaagcatcacatctatagctccacctctcatacaccttcattaaatgaatatttcaattattctcaatgtggttcttctgcttgcaattatattgttattgctgctttactacaacacaaccagaaagctcaataaaatagtgaagctagggcagattcccacagtcaaagaaaaagagagtgatgatgtggaaatcagtgttgacaagaagatagaaataggagaggggacaaagatggtgacagtggaagagagaaaggaactcgtgttctttgatgataaggcaaaatttcaaatgggtgaacttcttagagcttctgctgaggcactgggtcacgggatcttgggaaatagttataaggctatgctgaatgatggatctaccattgttgtaaagaggctaagggacttaaaaccactctctaaggaggaatttgcaaagatattaaatgcgattgctgagatgaagcaccccaatttgttgcctttgcttgcttactaccattccagagatgagaagcttatgctctacacatactcagagaggggaaatctttttctcccggcttcatgggtaatttacatcaacttgcttcatttttttt

SEQ ID NO: 6059 - DNA, 855 bp, Glycine max
aaaaaacaatttgcaaaagctgtttcaaatcctcgttttgctaagctgaaacatcaaacgttcaaggttttgcagttgctttgattttatttgtttaaattcaaagaattaccaaatgttgcattgcattactgcaaggagactgaagttcattatattgtcctaagttctatcttggaggatttgtaatttcaagttttcttgggtttcacttttatagatggtttaagtgtttaacaagtccatgagtccataacaaaaggtattttcaatctttcagaaataaattaaaatttattaggcttagtaggttcggttagcttgcaattcttgaactgaacagacgagtacttgtacgtgatggattatggacattttcaatgtgaacctccttgtctttcactaggcttaggtaaggagtgtgatttgcctccctctagtttcctttctttcacagaaattcaactaataacaaaaaaagtaagttgctaaaattctagagactgttaaaatagacaaaattataatgaaaactacaagagtgatgccaaggaataggacgattggagaagaatcaaatgtaaatttgcaattttatttaaatggtagttggattgagctagtaagcacaagcacaaacttccaattgtagctttgaaatagaaacaataatttattctgaggactaatatcactctctcaaaagctgataaaagtaaaaaacttaaaaatatcactctcaaaaacataggttaaaccaacaaatgaagtttaatgaaaaataataggcacccatcgactaaaatgagggcgatgctgacgaggtgaaggtgcaggggtaggtgatggtggtag

SEQ ID NO: 6060 - DNA, 840 bp, Glycine max
aggttgataacacattgtagtgacagaagagttcagttgccacttgtccaatccatagttttaaaggaatgaacccctcaagaattttgtttctacgagatttcagcatcaaggaatatatatatatgtgtgtttaccctttgattaggtacgcttaattccatcatggaagcaattagcaggtaatttatataatgcgttacattatatttacatgtgttaatttattttgagacatttttatttatcctcgatctcagtttgattcattatgtttgataattattttattttaatgtattaagttttaaaagtttcattttaatcttttatatttttaaactatattgttttggttcctttttaatttttctttagaaacaatattgttatggtaattttaaattttaaaaaagaaacaaatgatacatttagaaaatataaataatcaaaataaaacttttaaaatttaatgtatcaaagtgaaatataatagacaaaaagtgacgttaaatcttttaaaataattaactttatacagtgaactgtcattatctttattttatttttttaaaaaataaacaactaaaaaatcatcatctcttctaatctcttttagatttgaaaaaataaaaaatgcaatatcacacaaattgaacaacattaacacataaatctggttgaaaccataaaaaattcttatactcctcaccaaaaatcaaaatccttcatataactatgctattgaaaatagtagaggaaatcgagcaagaggtttctctttgacgaaagataaaacatgatcccaactcgtcaattatcccaaatgatggaggagtc

SEQ ID NO: 6061 - DNA, 1300 bp, Glycine max
  misc_feature (1213)..(1213): n is a, c, g, or t
  misc_feature (1223)..(1224): n is a, c, g, or t
  misc_feature (1235)..(1235): n is a, c, g, or t
  misc_feature (1251)..(1252): n is a, c, g, or t
  misc_feature (1290)..(1290): n is a, c, g, or t
cgaagaaagggaaggatcaaaagtttagtagttttactttcacatgtttattaaattatggtttcccccgtttcatctcaattgtatattacttttatcatttttaagagtatgtatgtttgcataagtaaataaacgaaaatgccaccatgtaaaatatagttgcaagtttcaactgtgaaactataaaaacaaaattagcacaaggatcattaatttacattgcactaagtaccagctgctagttcacttattatctaagcagaggcatgtatgcctcgtgacatgcatacatatatcgaaaacttccaggcttcagtgacaacattttcatgtttgggataataaccgcttgtgacttgcattctccattgtcaatagtcaccaaccatcattttcatgttttatttgtaaaatatttttaagtggccaaaccttttgtttttatctactgtggaatcatggccaaggatgactttagttgcaaaagctttcaaacataattaaaaacaatcattatccttgaagttctcttttgctgaatgcattctgaaaaagcagtagagatgtgtggacttaatatcattgcaaatgtgaaataaataaaaaaaaatcaaagaaggctctaatttagataattcaagtcatctcatacgataacttagtaaagacaaggtaagatatttatgaaaaaatataccaaaatccactactttgtaggggcgccctttggagaagtcccacaacatgagcattgaatcaagacctccactaatgactggtaaaagaaaaaaaatggagtcaactttctatagatgtaacttaaacaaatggggctgttattgcaaaaccttataccacaatgttcgaaaatttcattttaaatagaatcttgtgcttgtacaaattatttcttcatggttagttagcatgtatagcttgataaaaatttctacattcctttccattaagacaatgggtattctaacaactcacacatatctactctagacaaaacaatcatatcttattctcattgaaaaccatgaattgcgctgcaaggaggagagacagagagattcgtatgtgaaaaataagcaagactatatttaagtaccctcccaagatctccaaggaaggattccacagtgctacatatctacaacattaagataagctgaaacactatcaaaaaatcaaattacttactaantgtagaacannataatgagaanaaattgggtggcaggnngtggaaataaaaatattagtgggttgagataaaagttnctgattacaa

SEQ ID NO: 6062 - DNA, 869 bp, Glycine max
agctcgagacccggttatcctctagagtcacctgcagattcaggttcttgtccttctattctactattaataacgccaaacttaacaactagatttgtgtatttctgttataacacacgctagctagctgttcatttgagcaaccaaacccatggctcttgcgttgtcaatgccatctgcaaactgatattgcaatcaagcgataagctctgcatttataaccttcacaggttcatcgaaccatttatgatttgtgggatttcctttttttaactgcacgcatgccctcttccactttttgtaacctcgattcaagcttattaattacaaaatgataatctccttcttcttttttttaaagtatttcccaagtgatattttacttgtccttggactagattttatatccaaaattgttttggtttaactatattttgttctctgtaatatacacaatggtttacacacacatatataattatagttttttgttttgttttgattcttttgatcaaatagttattttttcggttttgttcttgtaatagtagtatatttaataatttgctttttttttatcacttttttttcaaaagaattaattaaaaataaataatttataataaggattaaattaaaaatattagaataattaaaaaaatactagtaaagattaaaataatttttttgtaaagacaaaataattttaaaaagcctacttaaataaagaagtcatatattatatggaccaacaacaacatatttagtaatgaagttcattaccttaacggagattctgaatagttgaatatcattaatgggttatccaatactacgaatcctagatctgatattacctggttaactct

SEQ ID NO: 6063 - DNA, 1221 bp, Glycine max
aatctgtttccatcactcattgaaggaactaaaattttcctcactgtattacagctggaagtcattgttgatgtccttaatgggtgatccagctgatgaaaatcttgaaactaaagagatggatgcaagaagtttgtcattttcacatggtcaggaaccatatgtccacaaggttggaattcctccaagacaaaaccttttcaaggaattccaatccactgtaaaagaaacacttttcgcggatgatcctctgcggtccttcaaggatcaatctaagtcccggaagcttgtccttggaattgaagccattttccccataattggctgggggagaacttataatctcacaaaacttagaggggatcttattgctggtctaactatcgctagtctctgcattcctcaggtaaatttgctttaaaatgctgatttttagcttttgaagaataattgaatgatagattctaatatttatcttgaaaaacaggacattggatatgcaaagcttgcaaatttagatccacagtatggattgtgtaagactcttgtctctcattaacagctcagtttgcctatgcgtttgctttggatattggattgagattttgtttcctttccttataccctttacagactccagctttattccaccactgatttatgctgtcatgggtagttctcgtgacattgcaataggaccggtggcagtggtttctctcttgttggggactttacttcagagcgagattgatcccattgcaaatccagtagactatcgacgacttgcatttactgccactttctttgctgggattactcaagcaacgctaggggttttaaggtatgctaccttgactaggagggattgcataaatcttcctagcactaatgtttatgactgccttgtacatgtgctagttgctaccatcctctactgaaatgctctactttttaatacaccttgatgatgatattctggttggatggatcttttaatcaggttaggatttttgattgatttcctatctcatgctgcaattgtcggttttatggggggagctgccatcacaattgcccttcaacagctcaagggcttccttgggattgcaaagttttcaaagaaaactgatgttatctctgtgatgcattcagtgctgtcatcagcccatcatggagtatgctttctcttttgctctctatacctggaggtcgactctagag

SEQ ID NO: 6064 - DNA, 907 bp, Glycine max
gggctcgaaacctcgggtatctctagagtcgacctgcagagcgatgtggtttgaatttaaccatttctttgagttggttccaaagttattattattaaactgtgtttgagcaatatacttcatatattgtattcggtaatgatttttacaattgatacttgttattaccttacagtaaagataaaattattattgaacaatcaattaatcaacattttgttattgtctaaagtaacatttttgtatgtattttttttttccattcaactattatattattacactagaatcaaatatatattttgttttcattattaattatatgcatttccatatatactgtatataaaatttttccctacattatcaaccaactacatctacatgcctttttactagctgagaatgcgatttgtgttgcggttcttatttatataagaataaaagaaaataaatttttaatcacttatgctatctgtttacaatatgcaccatggcatcttttaaaatatgatacaattataatattttgtttacgttaaaaatataagaaaactccgtactgaaaatataagaaaattattagtaacaaatactatttctctaacatttgaatttaaagtgccaaaatgaatatagtttataatttttccttaattgtcatttaaaattttatatataaattaaatatatataatttaataaaaaataaagaacttaaaaaatatttaagaattaaattgtaatttaagttaaatgtataattttaaattttttatttaaattattcttattattattaaaaattatttatttaactattaaaaataatccatttatatttttgaataatcataaaaataaagtttgaacataattacttaattaaattttaatatttatatat

SEQ ID NO: 6065 - DNA, 846 bp, Glycine max
gtatgggctacacatcttttctgattttggaagctttttacgttaaaggacattagaagaaaacctctttacctttgacgagaaaacgaaactgaaacaaaattaaaaatagaaccgaaccggttcatttctctggttcgatgcactattaaaaatggtttagtttttttagtcttggctcaatttgattcatggttcaatttgattcactagtaaaaaaaaaaaagaaaaattcttttaacaaaattattaattttagcaaaaaaaaatattaaaatgatggaaaataaaaggaactgagtcaaattttgagctaggtgctaccaagtaacccaacatctacaaccccattataaaagtatccaaatttgatatgcttgtaaccgggcaaaatcacagaaccctatggaaaagagagtaactttcgaatatatttgtattgcaaagttggatttgagctacatctaactcttagccatctgattctcaagtatggctctagagagaaatattcagccacatatgtaatggtagaatatcacaagccacggtaatactatttgaggggtgaagatgatacttaaatacatttgagcaaagatagagccattatctgatctctagcaatttgacttatctgaagacagccattcttttgctgccaataaatcaggaagaacaactgccccagatttcctccattccacagcatctgggggtcttaaacctatccaacaatagtgcatgcatccctatgctcttagctggctcatagtctttgcgcatgctgtccccatgtgcaaagcttcttcagggtgcatgtttcagcctctcagtgcatctcgt

SEQ ID NO: 6066 - DNA, 845 bp, Glycine max
acgccagcttgctgcctgcagccattagcatgtcaatttttgccttcttgtgtctagcagtatctgccctcatttcaggctacaaattatcaactcaaccttatatatgaagtcttaactttgcaaaactctcctactacagtttcatacttctatacaaatcactttttttctgtatattaatgagaaaaggagtcaggcctcacctctctggctcggtgcatatgtatacagtgagatttgatattgatttcatatacgaatacatgtaatgtttaatcatttttcttgtacttgagactatttattgaccaatttggccaaaaaaagattatgtggtgaatgcattatctgaatttgactgtgagacgcaagcaatggcagtcagaagactctgaatttgattttttatttctttactgtatgattacctaatgtacatccaaaaagaattttgacttgttaaaatcctagatggttcaactttcaactttcggacactcagtttattacaaaaatttcaggcgtgcaaattttccttaattttgttttgttttctaattaaatcagatatcacttgttatcaacaaaaattgcatcaaggactatgaattgaaaattcatcaaaatcccggtaatgatgtttgtgggatgtgactcaaaatcaacaaaaccccaaatgtgaagaattgaattagttgatgtcatcccggtagacatacacaacataaattcggttgtcataactgaattggtgacttggcgccaaaggaaaatctttttgctcctaaagctagcaacttggggctatatataccttgatcatgtaaatgagaagagaggga

SEQ ID NO: 6067 - DNA, 808 bp, Glycine max
aaaaaaaaattgtgtgaaccactctatatttaacgttaaaaaatgattctaaaaataacgttaaaaaatgttaaatgctacaactttgaagtgaaataatttcttagactaagaccagtcattctactactagtctaatactaaaaaaaaaaaagtcgaataccaatacatcctttttataaatataagctttgtatatacagagagagagtgcaattcaaatcaaagttgaaacattagatcttgacatacttctgtactgatttggtcactaatttttgttttatgactatgatttttaacttttaggttttccaaaggcacgctcactatgactgcctttaaaataataataataataataataataataataataataataatagaatggatcaaattttcttcggtttagaaaacaggaaagctctattaaatacgttattcgtggaaaacttttcgtcgttgcccctatagctcagtggtagagcgtcagtcttgtaaactgaaggtctgtagttcgatcctgcatgggggcaatctccttttaatatatcctctgttaatctttttgtacttcaagtagctatgtactttttttaagtgaccacttggaagagaggataatgtttaaggacaatacaaattgggtggtttattcacataaatatgtttatctcttttttttttttactgcgtcatctctatttttttattatcatatattggatcatctctgtttttggtccagtaaaaaaatgtgtagaatccttattatgttcaaggtcttgatttttagatccttcca

SEQ ID NO: 6068 - DNA, 911 bp, Glycine max
gattcgccagcttgcatgcctgagagcctccacgattcttcaacattcttctcacgctctttctcatcaaccgtgaaaacagatttccatgaagcacccacaatctgatttcacaaataagattaatttttagtaattagtattttataaagtaatgaggacaaacaggttatggattcacttatatgatagtacaaattaggacaaatatagtacaaattaaaaagagctcatggtaagctgttagatgaatttgaggtagtattgagttctctaacatattctaacatttcacagttagatgtcacgaaaggtgattatttggggataaataagcccaaagcatgaattttattttattttgaaatttgagttaccttgtcatctatgaacttggaccaaaaccgagcaaaggatctttggtaaggatcagaaggcaagatggggttgttcttccatgtctcatcaatgtactcaacaatcacaagagactctgctatgggcttctcattatgaataaacactggaaccttcttgtaaacggggttggatttgagaagtagatcactcttgtttgccaaattttcttccaaaaatttgcattcaattcccttcaatttgagggcaatctggaccctgcacacaaacgggcttccaacaactcccaaaagcgtcacatcttcctgagtagctgccattgtttgtagcacttcaaacagaaaaactatgtagctggtgaattaattgcttctttgtctgtgatgggtcctaaggttttattttctagagccaggaatcaggactagtattcagaggatacgtgatcaatttagaaaagatatacctatattatattatatccattacatatacatatcatggacatagtcaatagtggggacgataagaaa

SEQ ID NO: 6069 - DNA, 840 bp, Glycine max
ctccacatagaatgagtcacatgacagcattggaactctcttcttccaagctctatatatatgagttcaaacatacacacttccacaagacacgagcaattaacataaagatttattaacaacacagtcataacagagaatttgtggctctttcaccactcagcatgcttgtgttcattgccaccatcttccttccatccattgctatggccaagaaatttgtagtcggctttgattacgcagcttgggctgccgataaaaccttccaagttggggatgtacttggtaagttcaactcatcaaattatttattttatagtttactaatttcgttcaagaatttaaatgtaaagttttaatataattagtttcatctaatcataaatgaccatgtactataatattattgatttttttaataattagcttaagagacttaagaaacatatttaaataatttttaattaaattatgttttacaaaattagttgaaacttgaaagtgatagacttaaaaattaatttattaaattataagtattaaattataagtatttgataaaattaattgttaaagtaattaaaaagtataaaataacaaaaaaaataatataatcatgatttatttaaaaaaaagataatatattgagaataaaaaatataaaaaattgaaagttaaatttaaaaatattacttcaaataatatctcgaaaaatattaaaaactagtaaaaaaaattatttactgaataatcaaataaattttttaattgataaaataaattattaaaagataactaaaatgtattctgcaaacatacataatatatgattaaattttc

SEQ ID NO: 6070 - DNA, 853 bp, Glycine max
ataaatcgggaagcttgaacagcacgcttacgcatctgcgacaccataaaagtagaacccgcagaattgccgaaaattcctggccacattgaacgcattgctggaatgaaactcttcgttatgcaactctgtatttataggaataaaacaactaaggcgttatctctgacattcaaataaagtgaaaactaaggatggtggacaaggttatacacagaaaatatgatataagtgatgcttgccttatgattggctgagagacatgggtaaagctcgaagaaaacagataagcattgctgcaatctggcaacaagcgacaaattaaatcttaatgagcagccagtacagtgcaagaataatacaaacatggtagggggagaagaacagatctcacctgtgcaagtgttccgacacgtcactgaaatacaagtaaatgagctttgataaaataacaggatgcaaagaagctggtatgcttggatagttgtcacttaagagaagaattttggcaaacccctctccaagtatagcatgaacgcactcatcttcgttgctaggtaaaggactcgcccagtcatcattttcaaagccgccatataagatatcaagcgtcccaacatctaattccctttctgaatcagaaaaattcacaggagaaaaagtcgtcttctcactgtttaattggcatggaatactgaggtttaacatcttgtcaacttcttgaggaccataccacatcacgagatcaattaatgccttacaagcctctatactgattgaatgcgggcccttaatatatgaaatcctcaactgtttcaaaagttctgcacttggtttccttttcaaaagccaa

SEQ ID NO: 6071 - DNA, 850 bp, Glycine max
atcctctagagtcgacctgcagcagatgataatggcgaggtgaaggtatgccttgtatttatacaacaatgcttattctgatttcccttagtattatctcctttatcagctctaatgaatatatcctttccacttgtaatgcattagagatataaaagtcattatctcctattctaaaagatttgatacatgccataaaacatggaaatatactgtgttgtaattgataatttaaaaactgacatcgtttcttgtgtaatgtaatttactatttgttgtttagtgtactcttttaaatctaccatttctttaatttaagaaaaagccaagttaatggttaattattgtacattttcattttcttcattataattaaaatttcttttacagataattgacattcatcagcaatgcctgtataaaacactacgagctggtcatacaagtgtatccttgccttttagctcttcttcactacatggatgctaattatgtaatcagaagttttatctcaacccaataatattttatatttccaccccgccctctattttttcttgtattattttttttttctgtgattaataagtaattttattttttgataattttccttaacctagtgttgtagatatgtagcactgtggaattccttccttggagatcctgggaaggtatttacatatagtcttgcttatttttcacatatgaatccctctttctctcctcctcctcaaatgtgctcatgcacagacacatattgggtggatatgtttacttttctagacatataaatgttactaaaaagctaaatcaagaaagaaactggctagaggggtactgcaacatt

SEQ ID NO: 6072 - DNA, 846 bp, Glycine max
atccaccatgctggagccaatttgcattagttgccataacttcaggctgctgccacacaaggttagatgcctcattgatgggaatgccattaataagggatgcagaatggctggcaattgtctgttttgaaatggaggaagctggattcatagaactttgttgcctagcttctagttgatgaaattgttgctgcctttgaagttcttgcatctggttgagcattgcttgctgttgtaaaagctgtaagtcattcatccctgactgctgtctaggaaaagactgaagcattcctgaatgccgaccactcatttgctgttgacttccaaaaaaatcataattgacaggagactcggatgcaccagacctagtcaagtttttcttatagtgttcaagaccagacccctgttgtgaatctagtactgatatgcctcttgacagatttgacatgccatgcaaatcagtttctgtatccattcccaaaatgtttgcttcactttgccttgactgaaaaacctgatgcccctgcatatagccatttacagttgtctgttggtttgggggttgatttctgccagagtcaggcctcaaatttgattgagccaggttcaaaccatgtcgcaaatgtggagtgcttgtgtgtccctgctcaaaatctttgtacaagtaaaaggaaatacgattagtaatgggagggaaaaaagctgcatactgattgctgtagattaagtaagatactgattgctcaaaatcattgataaataagtgagaagcttttttttataaaaaaaggtagataacatctagttctacctgattgttgtagattaaagttcttcaaattggaa

SEQ ID NO: 6073 - DNA, 835 bp, Glycine max
attcctttgatatgcgggggcgcaccttcacattgtagttaggatcacggatacgtttcaatgtgtaagcttggacaatattgagggtggtaatgggagcatgacgaagcctgagtctttgcttcaagtaagggtccccttcaagaatttccttgtgtccagccacctacaagtacaccagaatacaaaaaatcatctagtaaaataactaatcatcagtcttgttttggggtgtttaaagttcaatattggccaaagaaattgactgtaggttatggacacatgttaagaaacattaatagtgtgtttggatttccgatcagacaacctaaatgcagggccatgttaggtatttgggggcctaatgccaattttttaaagaaattaaaaataatattatcaattttatattacttttctagatttataatcatgttgttctaatatgtgcatatgcatgcatgtgcctatgtgtttgtgcaatccatagtcctactcctacaccttccaattatttatttctctcaccagttcatggagaagatcaatgcatttatcttcttattgcctttaatgaaagcccttttgaaatgagttcaaaactataacatgtaatgtttacatggttgaagtggcattacctgaagtaggagtttcctagtttcttcatatttgttcctcaattgatccccaaacggccacagatcctttgaaacaaggagtctatcattcagagcggcaattttcggatctcctttggcaaacaccatttccaccaaatcaagtgtgaccctaagaaggccattgattgtacatctcttgcagcatattgaga

SEQ ID NO: 6074 - DNA, 841 bp, Glycine max
tcgaaaatagttactggttagcagattagaattgacctgcttaaaaaactgcttttggtttggtatggttatatgcatgcaggctctgtattaaaggaggaaaggaagaacatactgccttgttatccagtgtacaggaattggcaaaagcattttctggatatgaagatgaagtgctggtaatgatgttagtataatggtattaatggatgtattactatgtattgatgtgtttgtaaaacctagagtgctaacacttatctatactaatcataaagctaggattaacaccaattgacactaagtgaagttattaaacaaatatataagctggcaccccgagaattgaggtaggcgatgtgagacttcctaacaaacttttctcagacaccaaactttatttgctaatggggcctaatggcatctctacctcatttaggaataaaggcagatggcttatacagctctaaatcaacgtcagttgtcagctgtgtatataaattatacaccttaccttgtggcggaatgtgtcaggggccaagaggagaggttcctggtccccccagagatttattttcccacccacacaattttttttgccttggtattcttagatatatgttaagataaggcttcctgctatttgttttaacagtatttaggcttcaaagtctcactattttccttaatctggactctatcaatgtatatagtcatacttttgtactacaggggtaataaaagacctaaatgatagagcttgaaggccacacgctcaaccagttaatcatatatacagctttggggaacatttcttcagcttttgacaagcaaatacact

SEQ ID NO: 6075 - DNA, 896 bp, Glycine max
ttgcatgcttgcagttaaggaattgagttgcagccctgcaccaacttccagatttgcccagacagccaagatggcttttagaataattaatcttgaggccagaaacgttttcaaagcatctcagaatgcattttaaagatctaacattttgctgagtgggatctccaaaaaacagggtatcatcagcatattggaggatgttcacttcttcttttaaaattccaactctatagctgctgaatagattcttggacacagctgatctcatcaaacctgtgaggccttccgctacaatattgaagagaaggggtgcaaggggatcaccttgccttagacctctcttaggagcaaattccttagaaggacttccattaattaaaatggatatggttgctgtagacagacaaccattaatccatttcctccacctatcacaaaagcccatcctcatgagcatgtagtcgagaaagccccatgaaaccgagtcatatgccttttcaaaatccgctttgaaaaccaagcaaggtttatttctagccttagcctcagctataacctcattagcaatcaagacaccatgcagaatgtgtcttcctctcatgaaagctgtctgtctatcatctataaggtgaggtagaacaacggccagcctcttggccagaactttagccacgattttatagacgcaccctatgagggagatgggtctataatcattaaaagattgaggatcattaatctttgggatgagggctatgaatgaagcattagttcctttggggaaggaccattgatgtagaattcatccataaacctgatgaagtcaggtttcaggatctcccaaaatgcttaatgaaggtgaaatttagccatccggaccaggggcttttgtcccc

SEQ ID NO: 6076 - DNA, 711 bp, Glycine max
aaacctacttaaagaaccccaagcaaaatttctgcaacgtaggtaaacactgaagatgccaaagccaatccagtattctcacaaagcattagaaatgcatgctacattttatgccggggagtcatgtaatactcattcccttaaaatcttattcttagcttcatataaaagcaagaagcaagaagtattatatgcagattgaggaacacatagactaacagattgtggctcctacaccgtgcattgactagcaggttgtgtctagaaactagcagattgcaatgggaattttgtacgaaggaagtaaagggggggcatgagaagggtttgggggattcctgctatagatttcattacacaatattctatgctacaaaatagaaaggagtattgaatgtgagatgaacgaggtcaaatggccaaaattagaagatggaaaggaaagaaaggataataaatggagaaatttgctgaaaggtatagaatgtattgaagacaatgattaaagagtcattcagagaaatcctactatgtagccaacccaacattctggatcaattatacttgttagatgggaacttaattcctagcagtgaaattagttgggatggttagagcaattagtttgattcttagttagagggggttagtgagaaacatataggaagatttttttttttttttgggggggggaggcaatccaataagcat

SEQ ID NO: 6077 - DNA, 824 bp, Glycine max
gaaaaaattgctacagtgttcctgctgcggtaaattagtccattccacatgcctgatgccaccaattggtgatatagttcctgaagagtggtcatgccatttgtgtaaggagaaaacagatgaatatcttcaagctagacaggcctacatagccgaacttcagaagaggtatagaatttaaacatttctcttgaattattggggtcttgtttgcatggctcaaaattatcattttatgttgagtaactgatttcgaaagaaactggttgtaaaagacacattatcttctatcaaccaaattaaatgggagaaaaataatgattgatgaatgttttttttttttctacattatttcaggtatgatgcagccttggaacgaaagacaaaaatattagagataattcgttctttggatcttccaaataatcctttggatgatattgttgaccaggtagtgaacattgcttgattcacaacagaactattaaaatacaatgtttaaagtttattttaaaatgtcggcgtcagaagaactgtttaaatatttttgaagttaattttaaaatgatagcataccatctacctttttaaaatgaagtatggagctgctatgaggaagtcagaattatgttctcaattctgtgatcaggaagtaatgacgaagaacaatttttatagccaatatttgctattataaacctacattaggctgtgagattggaaaatatcagctcattgagtgatgatgatgcctatgctatgggatgatgcatggttctcttaatatacttgggagaattttagacaaataaaagctaactaaa

SEQ ID NO: 6078 - DNA, 833 bp, Glycine max
aagttgaagatgcttcttgcaatggaggtttggataatgctgaagcacagagggaagattcaaaccttgaggactctggtaaatcaacaatgtccagtgaaggcagtagcagcactgataaagataagtccatcaatgaggaaaggtcatcacttattgtacatcctattagggttgaaaatgacactgaatctggaaaccgcttgaagaaaagtgaaaaccctgatgtatatacagaggtccctcatatgaactgcttaatgtctgttagtaatgatgcacttccagttaaggatgatgacatagcaaacggacacattctttgctccacgcataaagatgataatgtagtggaggttgatcaggcaccgagtggcatttcattgagtgtaataactgaagtagatggtgatgaaacaatcaagactctgttggatagtccctgccagcaaagagctgatgctctggaatctctgctcgaattatgtgctcaactactcaagcaagataaactcgaagagcttgctggggtgctaagaccatttgggaaagaagctgtctcatcaagagaaacagcaatatggctagcaaaaagcctcatatcttcccaaaagtttaatcctgaaacctaaggtctggtcataaatctatacattgttgtaagaaatgtgcatttcaaatgtcacatgagtttgttcctttcgagatttgttgcttggttgaagattggagactggaagatagcatgccacatgttctttcttggtgtgtgtaaatggttatagtaaatgaattaaattattctggttaggctggatagccatttgggccta

SEQ ID NO: 6079 - DNA, 837 bp, Glycine max
cctgcaggtaattattcccaaaatgaaggattacgagcttaaatactcagtcactcaacatgatacattgataggacacaatgtgcattgctaaggaaagccataatttacctttcatgatcaagtagaagcaagccctcccagacagaattacaataagcattacctaagttatcaaataactctagaacggtattttcccaaaccctaacatctaatgttatagatctcacctgcaattcacagataaaatataattaccttaagaaaatgataatcggtttttaatatcaaatcagaaatcgcattatttaagaaaattgactcagatcaattataaagacaaaaaaaagtgtgtattatttctcaaaagtcaaagctaatgaattcttaaaatgaaaacccttggcaagaaaaaaagagttgcaaaaatatgcaagcactttagtgcaatataactatcctagagcaagaaaaagaattaaatcttcaccacctcaaactatggatgcttcaatgttaaagataaacttcgagacaaacttcaataaagttacaaaatgctcttatatccacatagatgttgaatttagaaggggagatttagagaaagatagaaaagaatatcttagagagaattttgagaatgggaaatgctttcttattcagttgaatgtggtacatagattatgcaagacatctataattcaatatctatctatctatctatctatctatctatctatctatatatatagggctcctatctttctaacacactttcttcaatcttcaaacacactctttttaattgattaaaatttattgggaactaca

SEQ ID NO: 6080 - DNA, 875 bp, Glycine max
tcgccagcttgctgcctgcaggcaaaaactgagaacccgcaatgagattgctgcgtttctaaaagataatccagaattcaaaggtgtgtctgcttcagattttgatttttcttccccaaagataatgcaagacaccatccctgaggttgttgagcagaaggattctgctaacaagaaagttaagatagccaaagatgaggtttgagaaatatcatctctagtttgcatgctgtgaaagatagtcattctggttggttttttggctgttacttcagagactgtttttgcggtaaaaccaaacatggcggcaaacatggcggcatcgaaacaaattttgttctcatgtttttgtattatatttaaatatgttattaccatgtttaaatgtaatcgcaattcacgcacctaaacagatatttactgcggtttgtgtggttcaaaattcaaacgtaaacggaacacccaaaaagatatcactgtttttcgatgcacccttattgccttgtctcgcaccaggcttctttgtcttttgtttacttttttcctgttcttttttatttattaaccttcgttttcttcgtgtgacctttccttgtgatctagggttctcattgtgaggggaatagctaaatactctaaaatcttcccatttatttcatgaagcagttaagatttttttcacttcagcaaaccttcctttatatgcaaacataatatttagacctgggaaatgattatgagatggatttgttgggaggttgattcaattagcgtgtagcacaaatctgtaggatgataaaacttgttttacaacctatggcataactagagcttatcacaaaaaaatctaactcattcattgaagctaaataagg

SEQ ID NO: 6081 - DNA, 823 bp, Glycine max
aaggttatttttttgagggttgattgatagataagcaatcatatactcccttcccccaatttcctctctttaattcgtggccacccttgacctgccttaattgtggcctcttggaacaccttcactgtgctgagtttgagagggtgtttaatcttgcattgactagagatatatccgatttaatccttataaagcttgggcaattctcaccttacaagtcagttttgtggagtttgatttattctatataagcccaaattctaagatagtatcaaagtctatactagtgcttgttgttgtgtctatcagaccactcgttatctggttgttattggaccaccgttagattctgtgaactttacaattgactgagatgtccagttcttgacatggagtattggagatcccacgttgattagtgatatgatcaaaattaagtgaaggacaaccctcactctatgggttagcttttggggttgagctggatccaaacccaaattctaagatgggttcacaggaaaggtgtgctatacaagttactgcatcaacacaattgtctgaggagaatttcaatggaagatcaagcatgtcaattgtcaaacctgtcatacagatcaattattgatacagttgaatgtattgaaaatttgacttctgagttaagaagttaaacatgtaggtagaagacaaggtctctgatttatgtggcaaaatggacaaatccattgaacatgggagagtacaacaacacgatgccctcatagtaaccaattagaaacatgtagctgatatacaaaattgcactaaatagcacccaatacac

SEQ ID NO: 6082 - DNA, 847 bp, Glycine max
agtctcaaggtgtgtgacacttttcaaacgctatcttctaaggtatgtatttgaatgagtgggtattctgttctatcataatagtatctgagacatcgtctctgtgtcatcctaatttcttgaaactgcttgtcaatacaatgttggcttatttcaataaaaggaaaagagtatgcaacttccctaaacattacctctttggcaaatggacaccctaaactttagctttgcctcaattgatccactttactctctttgcaaataaatatcttaaaacattaatttcatcccaatgaatccttaaacttttctctctttgtaaacacacattttaaacattaattttgtaccaatggatcctaaaactttacctcttttgcatatagacacctaaattttaatttcatctcagttaatccttaaaatttatccctttgaaataaactcttatattaaatatgggttaaattactaacagagaagaagtttcaaccggtatttatttcaaatttcaataatttattagttttattttcataaatcaattttccaaactttaaaaatcaaaaggatattttttaaaattaatatttttattctattttaatatatggaaaaatggaatgtaacaaaaaaaaagattaatgaatgattgacatttaagataagtaaactattgatatttctttttcgttagtaatttaactctaacatgataggaagaactattttgtaaaaaggctagagtttaaggatcaattggaatgatcataatggttcaaagtgtctatttgcaaaaatgcaaagtttaaatattaatttgaatgaaataaagtacatggcctta

SEQ ID NO: 6083 - DNA, 874 bp, Glycine max
tgtatttacaaatctaactattggcctctaattaagtcactggtttgagaacttaacagacacgaaaatggtccaatcataaactaacaatacttgtataacgaaaaaaagatatgaacctcgtttagtacattcaatatgtttttaacaccattctccccacacactgctcccttaaaaagattgtgctccaaaagctgccggtattaacatgaggaaaatggcctcattgtagtttctccttgcctgtacaattattgtaaattgcagcactatatgaggatcatattcatacccgtactttattggcagcttccttgatctggtcaattgtaaaaataccaaagaagtcatcatctgtgacaccattgataacagccaacgcaacatcgtcaacactaacaggtggagccaagagtagatcagatgcaggaagagagcttagaggtttggtgaagttctctactgctcgtagaattttttctgctggctcccctaccaaatccaaaggaagctcaaaaccatccactctcctcttgccatatatgaaagcaggtcttaagacaatacctgaagatgttaagatcatagtgaactgtcaagaatgcaattcaataaaaacaataaggcctatccatttagttagctttatatccttcaaaagcatgatactcatcttccacaaaatcagttgccggatcctcagtgaactttagctctgatagtttttaaatagccatttcaacaatcatttgaagatcaggtgatgctatatgcaaatataggttttcagtttagaacccttggatttataaaactggaataccaatttagtttcaagatcatgaaaggctagaatactacctgaattggg

SEQ ID NO: 6084 - DNA, 901 bp, Glycine max
cacgggactcggaaccccggggtatcctctaggatcgacctgcagtgtgtctggtgattatataattatactgaaatattatttatttctactgtacagttttatgtttatcctgacaagactttttatagcacaaatttcatagaaaatcttccatgggataatcaattctcttaatttagataatcttaaattgatttgtaattgttcactagaaaatatataagatgagcattcagtatactttttatgcttaaaatattaaattttaattatgtacttcttgaggaccaaattttcaaatatctggcaagaaggatcaagacaattaagtatacttcaatggttggattgatgaagaatacattccttaaaaatattttgaatggtgtatgcgtataaagatttgcacttgtattgattaagatagatgtgcataataaattaaaattatagctttaggtctttctcctttgcctgcatagtctagtataaagggttattccaaactatacctgttgcatgttggccttgaattccctccctggatttatcacattgttgactgtggaggtgctgtagtgtcgactctgtcaggatatctcttttctttttctttttctttttccatggtagggaggatctggtgcttatgaggatctctatgtagtcttttaggtatttgaattatgagaatgcctgatgtgtgcatatattttatgtgttgtgcccttgttgtgtattgtcaaactttttggtgaaaagggtgtgatccctattgtttggaatataatttggagaatgcctttgtaattttaactgattcagggtagcttgatttttgttactcctatttaattatgaattttgcatttcaaccggagaacttggagtcaggttt

SEQ ID NO: 6085 - DNA, 868 bp, Glycine max
atagtcccacattggctgattttttgcatgcagatgttacaagggaaaaagaagtaaatatcagttactgtgacttcttttcttttcttttttcatttttctgattttagaatctgattgtatataacttttcatgtcatttaccattcttgtcaggattctaataagagaaaaaatgatggttcaacatcatgttctctaaggaagaagagaagatttattgctggtgaggaggataaaggtgctaaaacctcaaggcagctgagaaaacaagcagctcataaacctgcaaacagttcattgaatgaggatgttgaagataataatgaccttgaccctccttataattctaatggagatgaacttcaagaaaatgatgacgactatgaagtcaattatccatccaggaagaaaagagtatcaaaaagttcacagaagaaatctatggctaaaagtggaaaaacatctcaaaagcctaagaaggcttatgaagatttagaaaaaactgaggaacctctcaaaaagttctctcattcaacccgacgaaaaaaaagatgcggtagaacttactagactgtttatttaattttcatctttggtgatatacttatgcagaagtgtttccttttcccagtggacaaggctctactggaaattcctgaggatgaacttgatcgtttaagaatacctattaaagatattattttacttgaagaacatagggagcggctggcgggggtgtatactctattctaatccctttggtgcatgcctaacaattgttattctcatagtatggcactatgcctttaaagtttcaccaactgttcccatttgtttttcctatgtagaaaaaaggaggcgatga

SEQ ID NO: 6086 - DNA, 874 bp, Glycine max
  misc_feature (837)..(837): n is a, c, g, or t
ttgcatgcctgcagatacaaaactcctgcttcctatgagttaatgtctgcttgtaattgttccaagcttttccccttggtttctggcaccgcaacaattataaataatatagccagtgcattaattgctgcataaagaatgaaggtacctgcaaaccatacacaaatgaatttactggttgcacattaccgaacttcaatcttctactattattccctggtggtaaaccaattaacatgcaataatggtgataattacacctttaaataaaataaaactgaaaaccatgacttgtatttatttaccataggagctccagctcatgaagaagttgaaagtataggaacataaacatgcaccaaaccagttcactaatgtggccacacttcctgccagccctttaatattaacaggaaatatctgtaaccaaaggtaatattagagatagttttacgcctctcttgctaaaaacaagtcttgctaattacctgattttgatagtgatcaggttttataagtggagaatttgcttgttgattttggcacaaatatcttgtccccaaattgagaaaaataaatgtaagcggagaaccatcatttgcttgttcttaagtgcatttgtaattatagaaattccatattgtatgtttaagttgtatcacctttcttatgcttatcctagtggcattaaaatttgaaagaacagaaaggaggggagtaagtacctacatcacaacccatggaattgctcctattcctattgaaaatgatcctatgtagacctaatatcaccaaaaaatgtcacatggagggatgagttcacatttgagatacatncaagaaaacatctcagaaataatagtaatggtcacca

SEQ ID NO: 6087 - DNA, 864 bp, Glycine max
ttttacgccaagacttgcatggcctgcagcatggcagctatataaggctcaggaggaacttataaatgttgccaagaaatttggtgttaagctaaccatgttccatggtcgtggtggaactgttggaagaggaggtggacctactcatcttgctattctgtctcaacctccagacacaatccatggatcacttcgtgtgacagtccaaggtgaagtcattgagcaatcatttggagaacaacacttgtgctttagaacactacaacgtttcactgccgccactctagaacatggcatgcaccccccaatttcgccaaaaccagaatggcgtgctttgatggatcagatggctgtcattgctactgaggaataccgttccattgtattcaaggaaccacgctttgttgagtatttccgcctggtaaggaccacatttagtaaacaacttaatcaagtacttattcattgagttcttatcagatgacatatgagcttgttaataaacttgattgtgaaacatgcggaaataagttatagaaggaatagtccatgcatttatagtgtaaagagtttatatattattatccaatcacaaattaacacaatatgataaatttattaatttttacaataactactttcaaagtcataccctaccatgatttctgattcatcgacaatgtaaaactttttacaccaacattgcataaaaattaaactctaaataaaatttgtaagccacctgcatgagctcaaataagtcccttaaaggtccccaagatctaattttatcatcaacttctcattttaagtaaatgacatttaaatgatgacatcactgtcaactttgtttcatgtaggcta

SEQ ID NO: 6088 - DNA, 875 bp, Glycine max
  misc_feature (839)..(839): n is a, c, g, or t
aatttctgtccaatatatatatatatatatatatatatatatatatatatgagaattccttgtgtctaatgcacccagaacatacaaaacgcagttccaaatggattggtcatgggtggcttaatattttgaagaataaatctgaactggtgtgagaattgtgatggacctacaagtaaaagttgctttaaagtcttaaaggtctagctagtcagttgtcaatgttccaagtgccaagagttcaaatgaatgttagcatcacattctattgcacattctttgttgctgggcaaaattcatgtgcgccaaactaaatagggagtgagattagtaagacccacatcatttactggagcatacacaaatttcactcaatagtaaagattatagtgagttgaaagaacaaaaaagtttgttagaaagggtgttgttaccatttctcaagagtttatgctgatggagatttatgaatttaacttgggagatttgtcttctattttattgaaaaaaagttgagaactctccagtctacactaaaaaagataccttgttagagcttgctctgtgggattttatctcatccacctaaaatgttcaagtggttaatagtgcttttagtcactgaaaagtatccaaacttttgttttatccttgactttaaagtctgggactaaaacaccaaaatgtggaaatttttaggaactaaaaacaccatcaaccctatttgcaaaatgccaaaataacagaggaaatatatacagtgcaattgagaactaaggatataacttaattagagaaggtaactctactcaaccaagttacagactagaaaatcgcanatgagatgtgatggcagcttagcagtctgatgattc

SEQ ID NO: 6089 - DNA, 821 bp, Glycine max
gaggcaccttttgttttgacatgggtggttacacaatgtgtccattttgaaagaatttggtaatagaatatggttttaagttgatagtggtgttaagtaacaaactttgtcactatcctgcacaggaatttaaaaaattttattatattttaaaattacttgagaagaaatttaaagcatttgggtgaaccttagtttaatgtttggttcttatcatgttggaattgaattatgttgcaaaatatgaagatgaatgctgagggatgaaataattatacagttgtgcattcttagtcatttcatagataaggatatcccagaaagatgattactgacttgtaacattctttgcaggtgtgattctgcttttctatcaggtgttacgttaatgctatttgcttgtgttgtatggttaaaattggtgtcttatgcacatacaaactatgatatgagagcacttaccaaatcagttgaaaaggtaataaatactctctgtttaaacggagagaaaattttgaatttttttttcttaaaagtcaacttttctctcttctctttaactaaacaaaagaaaatctatctttacgtgtttttttttttcatctaattttttcctttaccaaacatattcttaaattctacttggcacttgtaagtgggtagataactatcacaaaatatcatcgtcacttatttgtatacttttaaagatgaccatatgttgtacattgtttgtgatgattagttttttgaaccctgaacatcctgcttgatttagcagtagcttatggaatcatgtacttcttaaacttcattatatg

SEQ ID NO: 6090 - DNA, 792 bp, Glycine max
ataaggctcatcaaatcatgataggttggtttcataaacatttaaagtgagaaatcttatgtgatgtttgatccaccagtgaagtctcacttaaataaaacaacggtggatcacagtgggtggccggcaataaatgctttcactaattgaaggcagattgtgctcctttgatctcgaaactgtaacggtttttgtggatttccattttcatttcctttacttagtcttgctatttcgatcctgttttgacaagaaaaatgtattgtggaaatgggaacaactagcagatcgatggttgtgcttttcttttcttttcttttaaattcatgtttccatctgcaacaaccttcttcagttcgtaacatcaaatgggccttttcttttattttggtttatggttgctcaattctcacctgactcaataagtggtaattcaagttttacttttgcatatataatcttaaaatgaacctaacaaagttgcatataattcaagttctgcgttatcacaacagccatattggtgatatattataacatgagtgtacgttaggttaaagttggcaaacttgattttgaagtagttttggcaaaatataagggtgcaaatgtactcttagagatagccaagtatgtcacaaaactaagtttactctccaaattgagtttggaacaccccaaacaaaaatccaaacaatagccttagtaggctgcttgtaaaaagaacattgtcttcatgtctgagagcatactgcatcatcattcatccacataagttcacattttttacca

SEQ ID NO: 6091 - DNA, 1706 bp, Glycine max
ataagttgatggacagacaaaaactatcaaaatttatgtaattttttgtggataatcatgcataataagcataatatacattgatggatatagtaatcgaatgcaaactcaaaaaaaaaatacctgtcgatgaatgagtactccaactgctgacccctacgctcagagacaagggtaataacaggtcccacatacctaaaaattaaatcagcaataaattaagatagcgaacatcaggctctggagcagtaaatcaattatactcagggttgtacaagagcttactcactaggaatgattatagtagctaatactgtaggttcccaacaggctgtcactttatgcttgggattagagggtaatgaagcgggattctgaacttctaacttgctgaaaagcacagctagaaaatattagtaatacatagtggaattagcctgacaaatacaagtttgtcttttaccttccatcatgaaactcaaatacataaggcacagtaggaacagttgatataacatgagctccatactcctgtttacagaaacataacatttatcaccaacatgccatgcttgaagaatcaggaaaaaaaactttagttcttagaacaatatatgaattttccaaacataaggcaatataaattttgcccattccaagagaaattgaattcatgatgcctatgaagcatacacagttaaaaaatttgaaggcattacattttccaaaatatatctttaccatcagtttaaagtcatcatttggttaccatacagtaatgagttacctgttcaagccgttgatgaaaaacatccatgtgcagaaggcctaaaaacccacacctgagtgaacataattagaaacataaattattccagatgaagctaaatgtttcaatttttcacagaaccaaactctcgtttcattcttttagtaatagataccagacctgaaccccagacctagagcagtgctagtttctttagtaatagagacactggcatcattgcatgtcagcctctctattgcatgatttagagcttcaaaatcagatccatcagctggataaaggccagagaacaccatatgttttgctggcttgaagcctacagtttaaagttataaaatgattcaaaaacaaaacatttaggaccaagaaatgtacccatatattcaccaaaaaaagaagaggaaagaaatggacccatatatactgaaaataataacattcttgtacacatggagaaagaaagaacaatataatatcacatcagcttaatcatttaggcattgttttttacaggaaaagtaataatggtcaagcaatgaaattaactcattctattttcagtatgtccattacctagtacttaactacctagtacctacaagagctgaaaatgtaaatgagctacacatgattcaagagattctatgcagcaaagagcagtatgaatagtctacatgcatggatctgagttgtctgactatacctggaagaggctctacagtacttcgagtatgataaattgtatcaccaacacgtgcctctttagttgaacgcatgccacttacaacataaccaacttgtccagtaagcaagattccagtaggtgtaagttcaggatgcatgatgcctatatctgaagcttcatatgactgaccagtagctgcaggtcgatcctagaggaaatacgggtaccgag

SEQ ID NO: 6092 - DNA, 832 bp, Glycine max
aacaatcacggggctactatatatactctcccctcacacttttcgtgttctccgccaccctctttcctttctccattttttcttcagcgcctttgctacttcgcaacacaccacaatggccaccaatgcactcgctggcacatctctctccatgcgatctctccttcctcaaacacaggtattgttttcccttcctcttttcataaatcataaccactagtactatgtgcttcgcactgcctcttctgttcattacttcgccgcaccttttactcctcacgaccaaccactcgatgaggtgatcagattctcatgtttcgctttctaggacatgatttagatgtattttctccgtgatttatcattttatcttcacttttactaattactgattgtactctactttctgtcaattttaattgtaaaatgtaaaaaaaataaaaaaatttggggttttatacgtgcttagacttgcaaattgccgagcaagtttctatttccccccgatttttaactaacaccactactttgttagtgatgagtgatgagagctggacagaaactgattttttttaacattctgtacacattaatagtgctctcttagaagtttttgcttgaaattttttgaaaaaactttgatatcttgcaaagttacaatttttttttattggtttatttttatttatgagctttgaatgggtggaattttttgaacaggcatttacctcaatttctggcctgagatctgcttcaatttccagctttgggagaaagaatgtttcttttagcttgcagccacgctcgattcgccttaaaatttcctgtgcta

SEQ ID NO: 6093 - DNA, 839 bp, Glycine max
acaacttctaagaaattatatgctctcatgccttgtgaatttacagcatgatcactgtattaaaatatatttgaaaaaacaataaatttctgaagcaatttaagaagggataaattaaaaagaataacagaaatataaacaacagtggccattaacacaacacctagacctatagatcaaaaccaaatataaaatattaattacctgtcagctttcattgatgatgactgctgtttctcaagccaacgccattgtagaatatcatgagcaatgaacccaagtttgtctttttcatcaattttttcaatttttgataacttagaaatagatgaagtgactgaatccttctccactgattctgtgacacttgctggacatagttgggaattgaaggatttactcaacaatgatgacaatgttggcagtgattgtcccaacgcagaaggtggtccggcaaatgaagctggttggaaatgccgcttcggaatgtgttgagccacaagggaacgcacataactcagtgatttcaggattgcctcagaggtaaaactagatacaggcaaaggagatgcatttgtggatattgctaaagcaccagtttggtgattcaaagatcttgaccatggtcgattcagattaatatcacattcagcaataatggttgaacaaaaatgatctatctgaagtaaagtctcctcacttggtttatatctgtataaattaactagttgagaactcttaagtcttatagcataagtagcaagtaacaaatgttgttttcttgtgtaaacactgtaacacaaatctaaagaaatgcattcaagttataaattaaagaa

SEQ ID NO: 6094 - DNA, 853 bp, Glycine max
tcctctagagtcgacccctgcagggcagtgaaaatataactccaggatctctcaaagagattgacctctcaattcctattcacaggatatgaaaataagtgcctcctctcttatacgtctgccatttttcttaaaatacacattccacaaaacttgcccacgtaataatgataactactcgtctacccccaaaatatggatcacccttttctcctcctcctctcacacaagctcaacccttagtcctatttggacttgcctggctgccactacatcagaagatcaatctagttaaggcccaacaactgcctctaattctttgggctaagatacttcctctaacttaatcgcacaccaggcttgtggctgaataagttattcttttgggcaaaagataccacccctggataagttattgtttggctaatctatggtagttaatgttggactttaagggggcaacaagagaaaaaaatggaagtagcagaaataagaatgttaagatggatgtgtggccgcacaacggcacaagataggataggatacgaaataattgtgtacgaggagatattggtgtggcactgtttgaggaaaatatgataaaaaagccggttaaggtggtttagacacatgcaaagaagcccactggaatagccagtgaggagagcagattgcatgatttttagccccgtgaaaaggaggatagggagactgagaagacattggaggaagttggtgttgtgcaattcatgtaactgatcttacttggtgggataaaacttttgttggtggtattgttgtacccttagacaagttattataaggagactataatatttcagtgagcttgggc

SEQ ID NO: 6095 - DNA, 885 bp, Glycine max
agcttgcatgcctgcagatttgtgagtctgagctcacaccaactcatgtagggagtgtaaaatcgtgcattctatgactcagcatgtaattgtgactaccatggttcagattagggtaaccctaaaaatcagcttcaacagagcctatttgatttcctttcccaaacaaaatcatggccccaattgtatatatttaacatcaaagctgagcatatgttgctactcttggcccattcggtctcattcttgctctagcacctgtgttattattagtaaaccaatacctgctttagcttcacacttgtaagcctcatattttaacatcatacatgggcttaagagtataaactggaaatccaacaactacagataaacacgtcaaggttatgtttctacctatttatcatgtatgcatcaatcagcagtagctagagcacctgcactagaacccagaaccctccctattccaacgcaacagaagaatgtaaataaattgtccaaaatagtacattacaaatggaaaacaagagagaagccacataacaggatgaacaagttgactgcaactcgcatgaactcaatctaaaaacaaattgaactaaatgaagaatataaaaacaaaaacctatgaagagttgattctggagacagccattattaattcatacgcaaaatcaaagacaattcaaaagtattagcacattttttatccattccaaataatgctacataaagctgttttgactcttgcattttaaatcctttatcattcaatcatgaagtatcatcctaatggttaaattctaattaacacaatcattgtctttgaaaggattcctctttgaatggacagaaccatgtcaaatcattttcaccttcacttca

SEQ ID NO: 6096 - DNA, 873 bp, Glycine max
atacttcgtggcaaagatgccgatatatctgaggaggcagaggaaattcaggttcctaaactgttagatttagatataattctgcgactttgtttcgaagcgcaatgttaaagacaaagcatctgtggttaagtgggtgcatctgtcactgctacacaggattatattactactttggagcggctctcaaaatccaggctactggaattgtttcatagaagatatttgcgctcagtcactgtaactatacttctctccgttccaaattttcattgaaagctgctttctttttccttttggataatgcaactaaaatatctccgactttcttttaggatgtttttggtaggtttggtataggggcaaaaaataaaatgagttaaaagtcattttcaaccaagaatgaagatgatggaagtttattttctaccttgtgtttttctttttttttttatcaagcaaatttgaagtgactttcatgcaaaattttcatctttccatctttcatgaacccaaacaagtgcaccgtaaaggccacgataactaatttttatatatcaatgaccagattggaataggccttatggtctgccagcagtttgggggaatcaatggaatttgcttttataccagcagtatttttgaactagcaggtacgtacttatgagaatggctgtaatcataacaatgcatttgtttcgaagtctgcattccaagtctatgacttcatgaagcattcaaatttttattttttgggcatgaatatttgtggatcttatgtcaggattttctcctaccatcgggactataacatatgcttgcccttcaggttcttaatttaaactaaatcactagttgttcttgtaaaatctg

SEQ ID NO: 6097 - DNA, 851 bp, Glycine max
ctcctctcttctcccttctgtttttttttttttttctttttccttattcgctatatcacatccacagatggttaccacggcggtggcggcaccactatgcaccgccaccaatcacatatctaaacagagaaaatgaggccaaattacaaatatttcagatctataagagaatgcaaaatgaaaaaagttcgcaatcaagacttgattaagctcatatcttcatattctcatatgtaaaatacatttcattttgatccaagaaacttgtaacaaaaaaaaaaaaaacaacaaacaaatcgaaacaagtctttgcttcaaatctgaataaaaaccgaataaaaccaaaaactcttcaaaccaaaaacagcgaagaagaagaacaagacaactagaggaacttctcgggctggagttcagcgcgtcggcaagacttacataagatggtcaacaagtttgcctttcccacatgagtcttggtcctcaaactttcatcctctagcatctctcttccaaatgaaaggtaaaatcagaaaaataaaaaaaataaatgtacaatgaagacttacttagtcttgttcctcaaacatctctccttcaaatggaagggtaaaattggaaaaatgaataaatgtccaatgaagacttgggttgggtggcaacaagtttgtctttcctacccggtctttgtcctcaaacttctatatctacttgccactttaaccccatcagggcacaggtgcaagttgagattttgattggttgttggggctcccaaattcccaaaacagggatgatcttaagtaaaagaatgtttttggcacaagggaaaaatgggtatagatttcatgatt

SEQ ID NO: 6098 - DNA, 834 bp, Glycine max
atatgtgggcaatgggtgctataatggctgagttgttcactctccgtcctctattccccggttccaggtattaacttccctctctagtctccatttctctccacttctgcaacttcccatatgactgtatttttagttggataaaaccaataaatattgattaaggaattcacaaatctttgattcctgggttcactcttgttggaaagccaccttaatagtgatcaccctgtagcagttaatagcggaaagtggtgcgtggtggcccccgtccaaaaacgctatagcgggatagcagtagcgggatgaccgctgttttgatccctaagtacatttgtttgcaagatgtatatgtgtgtgtgcgctgaaaaaaaaaaagaaaaactcgttaaaattaaacaattcatattaagattaataaccaagtttcccaaaacagaaaaagctgcataacaacctctcacagtatcaccaaaacagaaaaataatcattgtttgcatctccaaaacttaataggttctgtgggtgaagccatgttactacttgctgaagttcaaaagaactaaggaagctggaagaaaaagaagaaagaaaggttgttgaagggctgtactttgtcgttggaatagtggctggaattgacgcttgcggcacaccggaaaagggttgtgcagaggtagggttgggagggtggcgtttaaggtgttgaaagggggggggggttttttttggtcaaagtgggtgggggttattaagttctgtttctagaggaagtaaaatgcaatgttttacttaatatttttttaaccaaaaattaacttaacgaagctgtt

SEQ ID NO: 6099 - DNA, 860 bp, Glycine max
atgcacgtattataatattggaatactagcagaagctaaggccaaagactcggtaataacatgatacaacgcataaatgagcatagcttttggtacaatattaagcatcttgctctcattattgtgcatcataacaatgatattactagtgcatacaacaacattcatggtaattactatgcacaatacaattcttggctgatttctccagcattctcaggcttgcgcaaatatataaacttcatcatatcctttcctgcaagaagcataaacatcaacatcagtaacttgacatacaaaacaaattcacgtcaaagttgaaaagacgtcttcggcttacccagccttcccacaataagttggactgtaattgtaaatgagattgtctagcaactcttgagcaactggtctgtttaaggatttcctagcttcactggcaccagaaaagtgaaagtggaaaaatgttagccattgataagttcatgaagacagaaaatatagctcaatcatttcattattcttgggaggaagtaacagatggcaatattatcacaatgagccctaacctgaccaaaaaatttgcaacatactgggttatctgaatggcatcctccgtgtgtggaattcttggtgaaccccattcaaaggcatttttctgtggcatcatttataaaggatattacatagctgaaataataagagtggtgcatagtatttaggataggaaatggaattcacaatactgcaacagatcatgcccagaaaattatcaatcacctctggatgccattggaaagccagtcacagggaaagtttgaggaacgtccagggcaaacattaacctaaacattactgaagct

SEQ ID NO: 6100 - DNA, 876 bp, Glycine max
  misc_feature (809)..(809): n is a, c, g, or t
gacatgataagatgctctggagtctgggaaccaagtgctgctagtgcaccagttcgaacttcctcaatttgcatcagttcgaacttgctttcgataaccgaaatcaccgagttgtaatcagaaggtagtccttttagaataacatcaacatgttgctccggtatgatcggatctctgatagaagctagcgcatcagccaaagctttgatgtgcagaagaaattccgagacggatttgttatcaagagtagtagatcgcaactttgtgcaaagttgatgagcttttgctctagttaacttctgaaaatgatcgtgaattttctcccacacttgaaacgcatgaatggaccctagtacacacgataaaattgagctagaaagagatgattgaagccacgtgaggagaatttaatcttgtatctcccatgcaatgtacgcaggattcatggggcttgaatcctgatcagcttcatttgcatatctgagaggaatgtttggatacactagatatctgtgtaattgatgcgctttgatctctggttctacgtgttgcctccacagcaagaagtttgaatcagtgagcttcttagtgattgagtgcacgaaagcaaaagatgaagagaaggaaggaggaacagaagaaggaggattagattcggccattgcaggatcttcaagctctgtataccataatagaaacagagagaaagagaagagagcgagagagagaactagaatttgtgaaactggtaactctaattcattcccaaacagtttctggtgcattgtagcttttacactagatattgnaaacttggagagcaagaatttgtgaaactgtaaactctaacttcacacttttaactcacttaactga

SEQ ID NO: 6101 - DNA, 811 bp, Glycine max
agctattacaaatgcacggcccctggttgctcagtgagaaaacacgttgagcgagctgcacatgacatcaaagctgtgatcacaacttatgaagggaaacacaaccatgatgtacctgctgcacgtggtagcggaaactattacatgaacagaaattctctgaacagcagcataccagcacctataagaccctcggcagtgaattgttattctaactcatcaagtttcacaaactctctctataataatactagacatccagcaactggtaatcaagaatcatgttcactggacaagttcaagaaccctggaagttttggctattcagctcttaacagatcaatgagttcacataccgatcaagcgcaatacacagatgctgcacactcaaaggccaaggatgagaggaaggatgactcattccttcagtcatttctctcaaaggactactgaatttgaactggaccacaactttacgtataatcttggatatgtttttgtatagcatgtaggactttagttttttcacagcagaatatagacaaaaaatttgcaaatgtttacttatttacctcatttagattagtgattggcactacagccatagtgacagcaaattgctgctatacctgcctgccaagttcatgtccaaatagaaacttcaactttaccataggattgactgatgaattcagttattcttttgttgtatttgtagggaaaaaaggttcttctggaagaatcttcccgatatttcatcaatccgtagcatgtgtgccttgttttggcaatttctactttttagttttta

SEQ ID NO: 6102 - DNA, 852 bp, Glycine max
ttcgccagcttgcatgcctgcagtcttcccgaaaaggcaagggaaacatgacttcctagcttaacatcctcatctatccaagcattactcagaagactgatgcttataatgtttcccatatgcaagagaacaaattggtgtgggatatcacgacactcaagaacaacaacacttatttaaggggcaatttattatcagactatagaatcttttcaccatatccgcaagggtagcgttattcttccgcagactaattaattcaattacattcttattctctatcgcacttttttctttttattctttaacttgatccttcccttgctctcttttctttttgttccatcggtccttccacttgctatatatatatattctataatatatgaaaattgtaaatatatgtaaaagtgaaatggatcagttgagagttgagacatgaaagtacgtattatgaggaagggtacgcaacaagaggaatgcagtgcatgtacagatactgaacaaatggataactaaattaaactaggtcttctctcgtacgttattgcatagttggaactttcacatatgaaaattataaatatacggattacagaataatctttgtactctaatcgactacacgtacgtacgtagcatctaattaattctctattatatttcccaaactatttttctctatattgtgccattaccttttaacgattgacttattattcttcagcaattgtttgattcttgattcttttccacttgttcgattctagcttttatatctagcgtgggggggggttgggttttcttttaaaattacggggtaacattaaaacctgggataagagtttcaaa

SEQ ID NO: 6103 - DNA, 851 bp, Glycine max
gcaactgcaaacaaaagtatttttcaattttcatgtatctgaattaagcaagtataaaaaatcaatgcctacatgaaacagatctagcaattaatacaagtttgtggaacaagaattctttatatttgtaagatggcaacttatgctacaagttagtggcaaaattttgaagtgctttggttgataaattcaattgccccagcatttagaggaatatataaacattgacagtgaggatttggtaaacgatatcgtcggcaatttatttcttgggggaaagtggggaggtgagccactctagtttcccttgtatattttacaatgacctacactgctcgattgcttttcaaacacataatccctcattaccaccctccatataggtgaaaaggatgcatatacatacatatggacacaataagaagcttgagtgacaaaagcgcacatgatcaacatgccagataccaaatctagttctgtaactgatggatatgcttcaaaaaatcaaaagacatttagaacttgcgacgacaacacatcaatccaggtattaccttgcaattcatgcacatcaaacaaccatggcttgaaagcaaaatagctgattggtccattatgccatttttcagacccaaatattcattctcaatcaacctataaagagaaaagtaacatttaagagggctgatctaatatcaccagacaattaagaaatgactcagtagtatatctataatcacaatgaataaaaggatgggggatctaattccttttaagctttggtggcatcttaacttttcaacttcaatggcacattttagaaagcattttacttttccctatcaaaggag

SEQ ID NO: 6104 - DNA, 855 bp, Glycine max
tttattgctttgtgtatcccgggtctcctcttcgtcgctgtctgagaatacatcatcatctccgtttctagggactttactctcacttgaattagatgtagtagactttggaccaggtagggcattgcttgtgtttccatcagatcctttgctggcaggatttgattttgtatttgcaggcagggtgccattatagtctatcatcacaacttccaccttgaatcctggagcagggatctttctctgaagggtgcaatcataagtttaaattatcgtcaggttcagagaataaaccaatagaggtaccttggggtagaatcaccgtaagataataaggtttacccgcatgcaaaataacattgaaaaaaagtgcatattttaccttgtcgaaaccatcaaaatctgaaccatccaaaaattttcggttttctgtcatcgttgtattcatccaactgccaagaagaaagtggtacatcaagaaagctgctaatctatgtaaacaaactgtttcatactatacacaattttgaagagaacaaatctttaatgtatagtggaaaagggaatgaaactattcttcatcatacaacatttaggccttcgtatcaaaaagattctgataaaatcactatataagccacaatacaatcataatgattctgataagtgattgaaaagcagaaataaagggtgaccaaaagaaataggtgttctgaacaaaccagtagaaatctccctggtcgatcttgaaactgaattttgaagtctcctaccaactctgctagaccaggctctcctggtagggcaaaaccacaattcctttctttggtacactgatccagaatcttctgctga

SEQ ID NO: 6105 - DNA, 858 bp, Glycine max
aagaggattgggacgatcgcagcagtaatattcgacggagagaaccgaatccgtacacttaggaccgaaaacagcgccaacgaaacgcctgcaaaagagagagatgaagtaattgaaattgaagaagcaaaaatggagaagagagagagagagagatacaggaagtaatcgtaggcgccgaaagtgaggaagtagtgaatgcgttgaatgaaagtgccttcaaagattggccatcgaccgcagaggaaagagacaacgaccaccgcagtgaccaagccatggcacaccaataaccactctacgcccattactgcctatgcccattccacatcaaacggatccaatcttctcttaactccatgcaatttttttaattaactactacttgtagtaaactttatttcatctcaattgagatacaataattgtcataaaccattaattctttaatccagtaaatttagagccttattaaccgatgccctaaattaaaagagaaaaaaaaaatattattataaaaattataggaaaatataaaaaaaaaacatgaataacataattttatatatctcaatacaaaattatccttttagttttttaatgaaagatatttgcctaaaatttattactgtaataaaaaataaacggtgtgacatttgactacctcagattcttttctattggagatccatttccatcactaaaatagtaaaagcttaagtatttttttacctcagccacttggcaaatatttcacttacctaaattaagttcattaaatatgatcaatcgtcaataaatacatctttagaaatataatactgagctttgaagaaaaaaaatgttgatgttgaaaac

SEQ ID NO: 6106 - DNA, 837 bp, Glycine max
agacgtcccttgaacctaccacacggctgcttaattagaatttttttaaaaaattgaccacaatatgttaatttccccaagtcaatttatattattaacacgctaaattcctaaaaaatttatgaatatattcgcacagtggtccataattcccattcactagtccaggttcaaagccactcctttatctttaaatactagagatgccttgctatatctgaattcattaccttttcctcttttgatatcataatggcttctatttcttgtatgagtgctattttaagctttcttctcatctctatctttctttctgtttacaatattgaagtgtgtgaggcacaagccaggcctcctacagcgaaggggctatcatacaccttctacgacaaaagctgtcctaagcttaaatctatcgttagatcagagctcaaaaaggtcttcaataaggacattgctcaagctgctggcttgcttcgccttcacttccatgactgctttgttcaggtaataattaactaaatagccaagctaggagagctcactcttatcagttaagcggtgtttttcctttaattgttttcatgtaaatccataacatttatattcttcccaccttaattaattataacatctttttaattaattcatacttttttaaaaaataattaatttagtattattattttctcatcatacaatttgccaattatttatactattattttaaaattggcattttcttaactttttatctattaaatatttttattaatatttaaaaaagaataattaagtaaaaattatattaaaaataattaatgtattctttaatta

SEQ ID NO: 6107 - DNA, 885 bp, Glycine max
  misc_feature (847)..(847): n is a, c, g, or t
tggttactggtaatcattcaaatctcaagctttctcttttcttgctttaatttttatggtctagttcttgattttactcttcctcctaaaaggcattgtacattgtgtacgaaaatgtcttcaactacttgtcctccaatactagattaaaaaatatcgtcctccatagggttctagactctatcttatcatatgtgaaatattgtcttcaactacttgttctagactttgctgttcggtttttgaaatgtaaagctctcaatctccatcccttcttcttgtagttcttgatttgcagaagcaagctgcgttgagatttaagaaatcaatcatggatcggaaagtatttggcaggtagatcttagttgagtggtttctcttagtacagaacatggaaacctgttgatcgatcgactatcaaataatctctcctattttgttaatgatattttttcttttaccgatattgtggatatagatagaggtttgattattttttaatatgtatattttgtatgaaatacgtcactttttaaagttggaaatcccttctgatatgtgtatgaaagagatcttttactaatgttggttctttgtgcataatttttataatgccggttatattatatatatatggtttcatttatggtttctgctaattgtcccgctgctttgtttatctcccttgcattgtcctgtcttgtgatcttgcaactggttatcaggcgatttataacagcatggctggagtgtgactcatgccacttgatgaatgacttcttacatggctctgttaatgcatgttttatttttcgcaactatacttttacgtatggttgagtttggntgataaatattagtatttttccagggatgatttcgggt

SEQ ID NO: 6108 - DNA, 819 bp, Glycine max
cacaatttgagcaggttgaaccactgtccattcctccaatgttccagcataaggagttggcacatcctgagaggataaacatactataggggcatccaaatagtcatggaaattttcagtaatagcagctgtcaaactagcaccaattccacctgttcgcatacactcttccacaattagcacacgatgtgtcttcttcaccgaattcccaattgtgtgaagatcgaatggtttcaaagacctgatatcaattacttcagggtcataccctttgttcaccagtgtcttagcagcttgcatgacatgatacctcatcctggaataggttaatatcgtgacatgctccccaggcctaaccatttcagcttcttcgagtgacaatacatactcttcatctggaattctctccttgaggttataaagcaaaacatgctcgaaaagaatcacagggttctcactccggattgcagctttcattaagcccttggcattgtaaggggttgagcaagccaccatctggattccagggattgactgaaaatacgactccaatcgctgcgagtgttctgctccaagttgccgcccaactccaccaggtccacgaatgacgattggtatcttgaactggcctccagatgtgtaatggagcatgccacaattgttagagatctggttaaatgccagaagtaggaatcccatgttcatgccctcaacaactggcctcagaccagtcatggcagccccaatgcccatgcccgtgaaggagttctcagcataaggggtgtccaaaactctaaggtccccaaactttgtggcaag

SEQ ID NO: 6109 - DNA, 856 bp, Glycine max
attttgaagggggtcctattcctaataatggtaaggttagtgaatcgttgctttttattgcatctactaacatgtggtttttctgcctctctctcttgcacaaacacacacgtcaatggtcactcatgttctgatctgttttcttgaattgacaaccaaagctgggttctaagcttaccaaaaaaagaaaaaagaagaaaaaaaagtaagggtttcaaggtcacagaaaattagatgaaggagcataaacttaaataatgaacaataaaaatcaaaatcaaaatgcatatgaataaaaacacacagaactgcttcacaccccaccactacccccatatttatcagtcaacattcactgaaaccaacatcggtctctttcattttcatctggactaaagccacacctagaaattccacaactgcatatgcatatttatccactatatacaacttaaccattttaattatttatttttaatcaaagacaacttcatgtattatgtaatatattctttttattttaatgtcgcctttaacttttttttaagaattttaatttcatttagtgtgtaaattagtttattacactattatatacttatttaaattcttttcttaaaacaaggtttcttgatttttacttttacgctttattattcttatatttattttttattttttagaatcctgcattttttttaaaaaataaatcctatatccataaaaaaagtatatataaatataacaaatgaaatcccacaaaaatgcaaaaattatagtatatttaaaaaaaatcattgtatatacttactcgtttacagtatacatgtatataattaaaatgtgacattaacat

SEQ ID NO: 6110 - DNA, 868 bp, Glycine max
atgatatagttaattaagagatggagttaattttaaacttgagccttggagacaaacattggaagcaaatagttttcacttgagtagaagtaagacgtagtatatgcattgtaaatttagcaagaacctagaggaaagtgacttggaggtgaaaattggagatgtcacaccatatgtttctaagtttaagtatttgggattaatattacaaaatgatggggaaataaatgatgtcatggtggttaaaatggtaaagggtgccagagattatttgtgatctgaaatacaagtacaaagagaagttttattgcattgggatctgaccaactaaactatactctggcagtgttatattgggctttaaaaggatgagaagaaaataagagtagcaaaaatgagtatgttaagataaatatctgacctcacaagaaggcacaggataaaaaataattgtatatgagaagatattggtgtgacactaaaggaatctaaaagaattgcagagaactgaagtgaggtgaaattgttgattgtattcaacccaagagaaagaagattgcacctcatttatatagacagttactcaactgtaactgttaactaacctgagttagttagtaacagctgtcacacagctgtcttaacagattaactaactaactatagactaactactaactgtagtttagcctttacagatcagttaaaacaaaaagaaaagtagaccaagtaaatatactcctataccccccgcagctcatgaggggttggcagaatgcttttcgaccactctgagcttggtcctatatgtagtaaaattagaaggaatgagagcctttgtaagatatcagctctttgatcaacagct

SEQ ID NO: 6111 - DNA, 794 bp, Glycine max
tgggttttctgttttttttttctttcaattttctgttttttttttctttcaattttctgtttttttttagtgctttcttctttttcccgttttacaatcaaatggggtttaaatattttaaattattttctttttcttggacaaaatgcattgttatacttacttggagggttctttgctctttgctcttttttcaaatgtcacacaactcaatcagtgatgcttcaggaggaaaacaattcatcagttccaacaaggaaaacatacaccaagaaatgattgttatgctgctattatttggtgtcatttcttatttatttttatgctttattccataccaacagagcatggtgaagaatgaagatctagactttcctttatgctttttgaatggtgaatgagtgttttgatccaatgccatgtgaaaatcatagagacgagtgcgtggaaagtagcaaaatgtcggtaactgagttatttcttgttctctttatcattttttggttccgcaatttggatcaatcatgggaatttgtgtattcatgcattggtatagttgtggtaatggtgtttatgtgcgtatcaacattggttatttgtcctctacggattactgattccttggtttttgtttattttttaagtgatttaatctaatgctgttaattcattgttcctctttgacttctgtagttaaactaggatgattggataattttggataaagggtttttttgaagttgaatgagccatagtacatggctgatatatgcttgttctggtttctgtagtag

SEQ ID NO: 6112 - DNA, 871 bp, Glycine max
tgtttcgcgaagcttgcatgcctgcagtaagatagtgacttctccctgtctactttctcttaatttggtccttaaaattatgagtatgatggccttgtaataattgaaaagaaattcatcagaagaatatctagctagtttagcttcttgagaaaaattcactttcgagcatgggttggggatattggaacagaggatgaactaggagaggagaacaattttcgttgtcaatgttttctgctttcctttgtgcatccatgtgcactttaattcctagtagtaacaaaataaatgatcattgaagaaatgatttattatttatttatttgactgtaactttattaaaagtaaaaatacttttataaccctgaattactaataatgccttaattacaaccagatcccaatatattatttcactcttcaaataatgttaatatctgttaatctgatcctatgctcattttctttttgttctttttttaataagctgttcgttttgatttcttttgaaaaacaccatgatagatcactgttggcaactgttcatgtcttctgactttctctgggtatttcaactttcattttttggaaggttggagtggcttacctcatggctttgcaatatgcaaatgatttagtaatatctcccacagaacttattgaatatgataggtaagtctatccaagtccttggggacagtcactatgcattcttcttgaaccatgggcaaatgtgtttttttttttttttttatttgccaatgttagtttttgttagagggaaaagaattgaaccccacgacctttcccttcttcctttaaccaccaagccaatcaccatgggcaaatgtatgaatcagtgcagtca

SEQ ID NO: 6113 - DNA, 815 bp, Glycine max
taattttgagaaaggaaaaggagagacaagttaagagaagaacttcccctgatgaagatagtgattctgaggtatttttcccctttaaatgtataaataaatgtgcttatacatgacatagtctgtaactgataatgaaatttctgccatatccacttgtttgatttatgtatgttattgcactgccagctagattgttgtttttcctaaggtgtatttcagtaatctttaataaacatattcaactctattaatcattgagtttctggctttgtttattgggtaattaggtctctttcagatatttagattcatatgtgccatggtggtaatgagctattatttgcctgacttaaatatgatttatgttttcaaaagaaaactagattttgtgcagtctattttttgttgataatgtgaaagcggaatttgttaagaaaacttccctttgtgtatatgatgttttattacatcagttttgtaaaagcatttattattattattattattattattattattattattattattattatccgtttcttgtcttgatatgattgcttgcttatttgcaaacagtccgaagaagaaagattgaaagatcaaagagagaaggaggaattagagcagcatatgcgagaaagagatgcagcagggacacggaaggtacttgtcaatgttcaaattaatttggttaggtgtacttggtcatttttctttaatgattattagtactattattggttgttgttgggttaatgccactgcttaagttagggtgttaagtagtagctgcatgaatgctttcttat

SEQ ID NO: 6114 - DNA, 843 bp, Glycine max
tcgccaagcttgcatgcctgcagtgaaatactggtaaaaattgtttttattcataaatttctactcaatttggttcctcagttcacattttaagaagtgataatgttatgcactcttaatttagctatacacaataatatctgtaaggatcaattattcttgaattgattttttaaaagtttaattaattgaatattattttaagtatataatgttttgtttatctatttttatctttgtattttttttttcaatatagtcacttatagagagttggagtagtttttaaagaatcattgaggccatttgcatcaattgcgaataaaggctgcatgttaaatagaccaatttgattgatgaatttgattcatattatatttattagttcttatggcaattgaaattctatattcatcatctgcaaaatttcgatatacaaaaatgacctgtccttgaaatcggaaaatgtggttgctgctgagatgaaattttatattcatcatttgcaaaatttcaatatattaaaatgacatttcccatgaaatcgaaaaagtgtggttgcctctgcgatatgaaattctataatcatttgcaaaaattttggtatacaagaatggtcctgtccctgaaatcagaaagtgtggttgcctctatgagatgaaattctatattcatcatctgcaaaatttcggtatgcaagaatgatcgtgtccttgaaatcagaaaaatgtggttgcctctatgagatgaaattctatattcatcatctgctaacactgcttactttcacaagtacatgaacttcaggagaagcttataataatatccccaggtattttctat

SEQ ID NO: 6115 - DNA, 822 bp, Glycine max
tagattgtatctcttagaccactaggcgactactaacaagtaattgatgaaattataaagaataaatcacttacatgattttcagagtgagaattgctcatcttggagaattggagcccagccgctaatggtgtgaatgcatcaattagaacccaagtgagattccaatatacctgaagaaagagtagcttggtctttaatgcatataaacttgatgcaagtttattggttaatctaaggaggcaacatttgcaaacatgacactacatacacacacacacacacacagatcaaatctgcaacaaaattagaactgactcaaacaacaaaatgaatcatctgttctcacatagtcaaaaggcctgtgtgcaggggagaatgctagtgttttactaacacagtggattagtgcaaatggtaagatcaacatcaagatagacaaccagtgttttatggacaaaatatcaaattaaaagtcgtcccgtaattgcaatcctagtagtaaactgaactattgttttcttcagttttaacacggaacaaagtgaatgcaggttttagtcataatccataatcatatcctcagcataaatcttctaaactgactcacccttctcaaagcacttattgtataaggttagcaagctccattctcccagaatgaattgcatgttgaactatgtaataaggacctaaccagcaaaacttttctaatgtgcttatttcaccctccatcaatgattataaagacacagggcacaaggtaaggtcactcacatgccaaacttgatcagccattcagccctaaaactttagtaatga

SEQ ID NO: 6116 - DNA, 831 bp, Glycine max
agcttcattcaacatggacgatgggattcaaaacacaccagaacgccattgtgtactgaaattgcatgacctatatttgcgcagccatcttttggaaaaacgactattttgctcgaaatactatgatgacaaaatgagataggttctgtttttctagttgcaaccgaaaaacacactttccaatataatttaagccaaaacacaaggattagagctctcgtttggataactgtttcgggaaggtgaacatacattgtaagtgcgttgaaagaatgatgtttttcattacttgagttaaaaagtaattttggaagagttcaacagatgatctaaatatagatttacacgttaagataacgaactttcaacgtcgaagcaaacacacattggatctttattgccttagtattgggatcattcaagtattcatcactcataaggcaggaacataacatagcttccttcagtagttatgtagttaatgtcaataaaagtaaatggttgcaaatgtagaggaatgcgggaatttgcataaaacgggcaaataaaacttaaatgtaaacacgttgttctgaaaaaaaaaaatcatctcccaatattactgttcgcaaatgttaatggataactagccaaaagatttgtttgccatgaaacaagaccgagtctgaaatctcggaaaagtctgggagctcgcattattaccaagaacactttgaattgtaaatattatctacgcctcagttgatgcttttgccaaacctgcaaatgtttagagcatttcgtgagcgaagactaaaatttgggaccttcaaaatagggacataaatttgg

SEQ ID NO: 6117 - DNA, 829 bp, Glycine max
aagtgtaggattgattctgggtaaatgaataccagacttagatctagtttgcataggatgggtgtttggtggtctttgaggagatgtgggattaatagttgaggatgtggcttctgaactgattgctggaacagaagcaacagtaacagggagagactgatctgtgggttcagtattagaggactgaactggactagatgctggaataggtgtgtcagtgtcagactgagctggctgatgagtagaagaagactgagcagaaacagattcagactgtacaacatcaggatttaaatgaccagaaacagaggtatgagtttgagtgggttgaggggaattagaagtaggatgtgagggatttggagactgaataataggaatggaggaagaagtggaccgactgagagaaggggaagtctcaaataagtcagcatagggaaacttggattcattgaaaatgacatccttagagatataaattctgcctgaagggacatacatttataccttttgtgagaggtagaataacccaagaaaagacacgcattagatcgaacgtctaacttgtgattgttgtagggtctaagcaagggaaaacaagcacatccaaaggttttgagaaaggtatattctggaagcttttggaacagcatatgatagcgtactgaaaaatctagtgaagctgtaggtagcctatttataagataaatggctgtgcaaaaggcaaaatcccaaaatttaagtggtaaggaaacatgatgcagtaatgtaagaccaagttctacacatgttctgtgttctctttcaacaactccattttggtgatggg

SEQ ID NO: 6118 - DNA, 819 bp, Glycine max
atcttcagcctgagaatcatcttttagaaggaaatgggattcaagaagctttaacgtttcaaaatgtcccacttttggttttccaaacagattttgaagtcttgcatcacaaataatctgactttttcggcgaggatctcgaagcttatttcttttgatatactctagcaaaagagtatgcacatcgaactgagataaaacagatttgtctccatttctcatgtgcataacaaactccaaaagctcttttgaagcccactctgagctgtcatctccttctttggaacgggacttcccccgtttcttggccttttttcttttagaacgactcaaatctgctttctcataggagctatctgaatctgatcctctatcgttagtggcatcaaaagtttcatccagtgattcctctttagaaagaagcatatcagatcccttccaagggtttttagcttgagtgagttcatcaaatgtgagagatagttttttttttatatctatgtagtagtccttgaagagatactcccagctgtttctgtcatcaaaatctatttgtccctgcaccaagcatgaaaataattatcagtagccaaaaagagatgtccctgtttaatatcattataaattcacgtctacaattctacattttatctttaaaaaactccatttataggggatatgtcaaactgctactgaattagagggagacactaacaaaccctggtctcctggggatgttgtggttcatattcttagggatgcatgagtgaatcagggaaagggttactttatgagaataagggcagtgctgaagatgac

SEQ ID NO: 6119 - DNA, 850 bp, Glycine max
agcaaatgcaatccataattaggctggggttttagcacaattacgcttcaacctaaacctttctattttatcaagagaaacattaggaaacattttctaacatacttttttaacacactctttacaattaactattcaaaatcataaaattttgtaaaattcacttcatatttagtaaagtccactcatgattttatagttttcaacaaattttaatcaataatagagactatattaaaagaaatatgttaaataatgtattgttaacactcgtattatcaatctctgagcttttacacatgattcattatggccactagcattcatattttcatgtcactagtgattcttgcattttgaattacttgaatcgacaacaaaatagctacaatttccagtttgtaaaaaaatttacctgtttgtttaaagcatctaatgtttcctcattaaggtcattactagctgtgatactcatcttcccgaaaccgggcaatccaaattccttctcaatggagcaaaacaacttcctgacctcacaagacaaatatgcaaggtcaccagaatccagtctaatgccaattgctttgtatctgctcagggcatcatctaaacttagcaatgaataacaatttcatgattctttgtaaaagaataaagtgattatggtagacatgcacgaaaaacttcttaacgtaccctaaatcactgagagccaatgcaactgcacaaaagttagggattccactttctcatgacctgttaacatatggcaaatgtgactatatgcacaaatagttgaatttaaaccagaactaattcacaaaagacataaaataaaagcatgataaac

SEQ ID NO: 6120 - DNA, 832 bp, Glycine max
acgaaattccaaaagatcgaataaaaaatatgcaaatgcagtgctaagattctattcattcaaataaaaactctagtaacacatggaactatcatgagataatctaataagctatattcaaattgaaaaaagaaaaaaaagaaatcccaccccttccattagcttttcagaacttgaaggtcttttgtctctttaatgggagggatgtctttaatggttcataacctaaaaatattcaaataagaatgagcacatagttatgagaataactactctagccattccacatgagtttgacacaaataaacatttttcaggaagtggaaccaaggaactcaacaatcagcatgttgcagttcgggtttaatagttatttatattactttccaaacatatacatgttttaatgcacaatttgataaatatgataaccaacaagttgtgagttagtgtaggaaagatgtcttctgtatgctattcccactagcctaatgccagtaaaacagagtataaattgctgcaagttttaaagtctaaacttcataaagaaggatggggttaccaaaagcaaattggttcttttgtcccgtcttcgaaatccaccacgaacaaaataagcagcctgtaatgtcaaatctgaattaagctagcattccaggactgtgttttcaaaaataaaaaatggagaatcatcatgtacctgaaatgggagaagtatatctagaagtccaaatctccatagtagcctcagaagagcttcaccagatccataagctagcatataatttatttccatcagaagcctactctggaacataaaaagggcaactaa

SEQ ID NO: 6121 - DNA, 844 bp, Glycine max
  misc_feature (831)..(832): n is a, c, g, or t
atccactgcaatttgaattcgttggttccaactcaatatatttttgcttttgcctacattttttagaatccaccaaggaatgcatgaattttaaatcgaaataaaaagaaaggcatcattcttttcttgcattttggtgcagaatatctagaaaatttgttttccaatacatataactgatctttgactcaatttttaggcttcatctaaatgtatctgaacttgaattgcttcatattttgttggcatttattgactgtttagccgttttatgcagatgatcaagacatctacagaatcagaagcatttactttctatcagtacctttttttacatagcaaaagtggatacaaacatgaatacgtattatgtaattgcccctaaattgtaacactgaagagaaataaaattaaatggactaaagtaatcttaaacaatacctgataaatgctttgctaagtctccattagccatatactcatagatgagagccatattttcgccatcatcacaatatcctatcagagcagtcaagaatttatgatgaactacagcaagaagtttggcctgaaaatcagaaagcaacaattcattcagttaacacaaataaaatatcattagcgagtatatatataattatgatgatatttgaagttaatcatattacctctgcctgaaattgcagatatccttgagctgagggagagagcattttgacagctacctcagtatcatctatccagccatggtacactgtagcaaatcctcctttcccaacaccctttcaaaatttctggtcatgctcaagacttcgcataggtgaatcttgnnttattgactcta

SEQ ID NO: 6122 - DNA, 867 bp, Glycine max
aaggttcttcccttgtggtgggagacactcgcatgggtcaaatcagtgggtgctttccccaaagatccgaaagatcacttcttgcatcattgcaggttgaatgcttctcgaacaaaggatatgagatggagttgttggtggatagccctcactaggaccatatggcatcatagaaacaagctagtttttgataaccaagcttttaacgcaagtaagctgatggaagacgcgctctttttactttggtcctggctcaaggttatggaaaaagacttcgatactcacttcaaccagtggtcgtccaatttgtcagatgtatttgtttaattagaaagggagggttatttctgccatctcttccaagaggtgaagcatgtatgttttttgagtttggggtttagctggggcttatttctctgtaccagctgtgttttaaacatttatttgtatctacagtacctctggtacttcttaatatttaatatatataattttgctgagcaaaaaaaaaaaaagaaaaatacccaaaaaatgtagctacagctctatttggtttcaaagtacctaagaatattataattcttatagctttagaagcctaattatctccatagtgtaactgttactttgctggcttgaactagttgactagttgtcttaaattagaatttaacctagactaatagtataaataggagatcaggttagtattctgcaacacatctcatcacaagcctccaataaatactgaaaccaaagaacaaaaaaacttacttcaagggggtaagccaacaatctttgtccaattgtcacaaaactatgctcctgattagacataaaccacgcaggggatgaaacactgcaagc

SEQ ID NO: 6123 - DNA, 854 bp, Glycine max
tctgtagagtcgacctgcagaaaggaaaatgctcctttactgccagtgtcatatagaaaatgattttgctgagttttattgatgacatctcaaaaccataaattcacaacaatcaagccataatcatagtcagcttaagctttgaaccagtaccgatgatataggtatcaggcagagcatggactaactaatattttcattttgaacatgttactatttggggcttggtttgtaattggcattgacacaacataactgtacaatatcatgatcatgatttgagctattagaaattagaacacaacatagttgtacagattcttcccacttatatgttgcttaatttgttcattcatatctaatgtgaaacttcttcacacacacttgccaccttagcaatttgagaggagcgaatcagcaaatgccaacatagaacctgaaagggaggtttcttagatactgttatgcaagttgtaaagaaactgatgaaatgaaaatattggttgataagtggagatacaggctagcattcatagagacccataaaaaaaatcagaaaaaatggaagtacccaacgctttcaagaattagactggctaactgcatgaacattaaacattttcaattcgtccttcatctaacgaaataaattggatgctcaagtaatatctttggcactaccgttttgagtgttattgttttttaaacttcaaattacatttaaatatatgcacaacagtgcattagttcttagtgtttaattggtatcctacatcggacatgaatgcgtgtttaaaaagaaaaaaatcatatctggcatatggaaactataactattagcttctcaataaaca

SEQ ID NO: 6124 - DNA, 844 bp, Glycine max
aggagagacagtttcatcacccacagggcattctgtgatgcactggctcaagagagtgcaagacaaccaccgagccttagcggcggcggaattggtagccacctgtacggaagcaccaccaatatggccttaaacctatctcaggtcggttctcagatacaagaccccagcaacgcccaacccaccgagctcctccgcctcggcgccacctccggtcgaaccggccatttcgaccacatcctcggttcacccttcagaccctccaaccaacaacaacaacccttcttcatgtccgaacaacccaaccaaacctaccaccaccccgaccaaaacaaacccttccaacaagggttaatgcagcagttgtctgatcaccaccaccttaacaacaacaattcacccttcaaccttccttttctctccagcaacacagccaacgcttcgttctctgaacacttcaacaatgccaatggaggaggcaacaacaacaacaacaacgagggcactaactacttcgctacttcaagtgcaccttctctcttcagcaacagtgccaatgccaatgcgaatgcgttatctcacatgtctgcaactgcactgcttcagaaagcagcacaaatgggtgcaacttcgagcaacggcaccgcttcgcttttgaaaagcttcggaagcgcgtcttccagcagcggcggcggctcaaaatctgaacaacacacagggtgccaccactggtgaatgctgcaaactacgttgggtggaatgttcggagggaatcacgtgaacgaacaacagagtaaccagtaacctccaagacctgatgaactcgttcgctggtggtgaaact

SEQ ID NO: 6125 - DNA, 822 bp, Glycine max
ttgcatgcctgcaggaagcaattgtgaaagaacgagggaatggctttatgagggccagtaattgtattatataagaaaatggagaaatgggtcaagagagagaaaacagagtgggagagagaacttggagatcaagctagctagctttaaggaataagagatggctaaagtcaagagaaagtgggcatggggtttgaaaatccaaattgtaattcagacaggatatcgatgtagaatgggattgttgggattgaaatgtgtaggtgtgggtctatagtaaattaagatattgatcatatattcaaatgttacaagccccacacggggcatataaattaaaactttttgttaatatgtcttaagaattcatcttaaagaacatatattagatagtatattattattattattttttagatatttaaaaatattaaattgttcaatattaatctttagaggtgaaatatttgatcggtatatcttttaatatatccagatcaagctatttgtagtgattttagcactcaagttaatgtgtacacgatataaataaatggatgatgaaaattaaagagagttcatcagacctcatgagtctgtttatatcattaatttctttcttgttatatcgtaatattttctacatctacataagatagcatcaatctattttgtaatgttttttaatagtttatttatttagtgttagaaggttctcaacacaatggtgtatgtttactcgctcaatgatggatctcagtcactggagcacatattggtttatttgtcaaatgaactcatctctaaaaagtagtccattag

SEQ ID NO: 6126 - DNA, 858 bp, Glycine max
tttagatcttcgaattgcctcttctgttggaagacaggttaaccaagataggaatataaggcatataaacatgcatgaaattacatggatctatatatatatatatatatatatatataagtttaacaaaccactgacataccttcctcctttcgtgttaatttttgttcagtcaactgacaatcaagaaacaattaaaacaattagaaggaagcaacagaaaatataaaacattaaaaagatatatattacaaatgtatggatggaactaggtaaatgtgcttctaatataaacatcattatattcttcaatgatattaaagaatctagcaagctttaaaaggacaactggacaacaagttcataatgttatgagcaataagtatgatccacatgcatttaaggctgataatagcaaagtccagaaaatcttctgtgccaagatacagttagtatctaagtcatccccaagccaagataactggcataaattccactaacaatttttcacagggttgggcaacataacactaattacggtaatacaaccacatgagataggcaagcaaggttagtagtttgatttaccctatctagccactaagtgtctatttattttgcattagagtgactactttcttaatgaataatcaatttggagttcttgatgaatgctgggtgtgtctatatacttctagcctagagcagaaacttggtggcagagtacaatttttttgttctaccatgcatatggttggagtagaatgcagacatcttcaaaggtgtttctatgcccttgcatatgctatgggggcaggtttaggctctttctttggtgctcagctatggtcagttaag

SEQ ID NO: 6127 - DNA, 885 bp, Glycine max
acccggcctgcctctagagtcgacctgcagctttgtagtcaacgaagacttcaccaccacctcaccctgcttcgccacgtgtccctccgggccccacctccaaactcacatgggtcagaaaccgattaattttttataaattttgtttctttttactcttaatattatccatgtaatcatgtaaatgccagttgaattggaattttgtaattgtttcattgttgttgggggtggtgactaaggtatgttctattttaattgatcatagcagcataatgtgtctttgcgcagggtgaagaaataatagtggcaattgtctcttaaggatgactccaatccacaaaaagcattccttcccctgcatccacaaatgcgagcaaaattaaacttcacaatatgaaattaagttagatttatcaagattatcaaacttgaaaattcactttagatccttgataatttcataaactcgattcatgattcaactcatagactcataagagtctacttcatatgaacataataataaaatatctacaaataacattttaattaaacatttcaacaatataacaaaataaaataataaatcataaagttcagaatatttaaataatcaaatctagtaataatatatcacttctagataataacttacaaaggttatagtagtggtagatcattctcatccaagatttgatgttattaaggaacaaagatttgatatgattaaagatgagaattttgtatttgagaataatacactaaacgaaggtatgtttgaatgttatacagaaaacaataaaaataacttgcatttttgggctgattttttttaacttgctaacttgttgactcagggataaacttgagagtctaccgagt

SEQ ID NO: 6128 - DNA, 1260 bp, Glycine max
gatcgacctgcagtatattaataggttccttcttctttccaactagaaagcttctatagagatttttttttgaactgcttccctcatcataccagtgagtccttccccaattatgttgaagagcaagggggctaaaggatctccttgcctcaaacctctagaggggttgaactccttagatgggctaccattaatcaaaactgatatggttgctgaatgaagacaagctgatatccatcctctccacttttggcagaaactcaatctaagcaacatataatccaagaaggaccaagacacggagtcataggccttttcaaagtccaccttgaaaatcattactggcttcttgcttctcgttgcttcctccaccacctcattaaggatcaagacaccatgaaggatatgtcttcctttgatgaaagccgactgcttttcatcaatgaggtcatccataacagaccttaatctattagatagaagcttagctatcagtttatacatgcagcctatcaaggatataggcctgtaatcatttagggactgtggttgagacactttgggaattaaagccacaaaggaagcattggtgcctctaggaaaggtaccatgagcatagaactcatccacaaatcttctaaactctggtctcaagatatcccaaaattttttgataaagttgaaattaaggccatcaggcccagggcatttatcacctccacaactccacactgtttctttgatttcttggtcagagaagggaaaagtcaggtgctgtcgttgctcttgagatatagatctaaaagggaccccatccaattgcggtcttgaataattctgttctgtaaatctggactgaaaataattaacagctgccttcttcactgaaataggttgctgaacccacactccgtcaatataaattcctggaatagcattgtaggctctcctataatttatcattctgtggaaatacccagaattgcaatccccctctttcagccaagatatcctagacttttgtctcaacaaagattccaatgcagttgaagcattccaaaggtcctgctgaagggaatttctaatttggatctcttggtcagacagaatacgattagaagttaagtcctccatctcattaagtttcttctggatgctggatattttgttagcatcaacattcccctcacccttactccactgctttaagacagctttcaagtttttcaacttattttttaaggcaatactcccccagcc

SEQ ID NO: 6129 - DNA, 849 bp, Glycine max
aggtcctttttttttttccaccttgttgagtggattgtggatcccttgaattgaatatgaaaaactccatctgtggtaacctgcatggtttcaacttgtgcatttgtgttattaatccttattgcgtcgatacttgtacttatagcttatggcttgtggagtgagctgctcaatgaggcttttatttgcaaatatctagttttggttattgatgagaattctaatgctagtttcattcagccaaatgccaattttaagcgtactattatggttaagcctttagtatatgctgttgttaaatgttaagagttttgcttttcccaatttgccttagctagattggaacgatatctagaattatattggaagtttgagtatgacatttcattaatgtacttttaatattagaatcagctgaaaataataaaatttatcgtggattacattcagtaaaatggtaactagggtttcagttcattcattgaggagtatgtactatgtggtgagtacttgtgtggtagccacagaaaattccactttacatgtattagttggactgaggaaaggtggagtttgtatgattgtatccaaaaatatgtatttctttagattaaaatgattgagttctgcctgtaagttttcttaacgatttgacactgtaaatttttgcattactaagatatctttccttgctttgctgtattatgagtttcttatgagttcatcctcatttccatttctatacttgggctatactttatcaaaagcactatttagacaagttaatattttccaaagatttttggatgaataaaaactctggatatcaacatccattgactcagctct

SEQ ID NO: 6130 - DNA, 828 bp, Glycine max
tgttagcacttagcactactgcaatcttatctcctacagcaacctttgtatgagcctctttaccacacatgcacagctttcactacatttatagttctcaagtgatgtctcgtttgaggctgctgtgagctaacctatcctcacttgacatgtggatgataacttcagcttccttcccattttccgtttccatttcgtggttcaaatggatggtttttttcaagcctcgtaaaaattacttggaaaaaagaaaataaaacagagatattttttttcctttgtgttactagtcgtgacaaatgtattacatgcaccaaaaagggtaccaattattgttgtctgtaggggaaatgaaacaatcaaagaagtatgaggttataatttaccttgctgattaactgttttgtctccttgtaaccgatttatggtcttggttcaatgataagatgctgtgagattgaggtaacgatgtctccagatcataccttgtcaatgggctccttgtaattatgccttcttcccctgccccacattgaacggctgtcatattttaatgggctaattaactcatatacatacaaactatagtattagtgtcacgctctggtggttttaaactttaaatgtatgaacaagatgtatcatggcagaaacaaaattatatttcatgctcaattgtcaaatattggagtacaagatgctaatttgtaattgttgataccaaaaatcgagaattgttccctatttactggtagtggtgctatgaagatatccaataagaaagtagggttggtaccacaaagacctaagatatcaattgaaaagcaa

SEQ ID NO: 6131 - DNA, 853 bp, Glycine max
cgtcctccactggctcaatcatgcaaatattgatgctgaattcatagtgattctagatgctgatatgataatgagaggcccaattaccccatgggaatttaaagctgcgcgaggcaaacctgtttcaactccttatgagtaagcctagtgaattcgatttatcattgtaaaacctattagtgttgttgacatcaatgtattgtggatggacttgtatttctgggttttgtcttgctctttcttgcatttagattatgatgacttgtttgttgtttccatttttattctttacatacagctaccttattggctgtgacaatgagcttgcaaaattgcatattagccatcctgaggcttgcgacaaggttggtggtgtaatcatcatgcatatagatgatttgcggaaatttgctttactctggctgcataaaaccgaggaagttcgggctgatagagctcattatgccagaaatataacaggagatatatatgaatctggttggattagtgagatgtatggttactcatttggcgcagcagaggtattttgttttaaaattttcacaattcatactcaacatacctgtttatctaagcacaagcatggtagacagacacaaaagcacagacaaattcaaagtgttctattcaagatttatatagttggcttaaatatgtttttttgtccctaataaataatttatctttgcgtttgctccctaagaaagttttgctttgcattgagttcttaataaaacacaattttgtttttagtgcttgacactttttttttttagttcctaataaaaatagcgaaatttggggttttctcccttataattttttttcattg

SEQ ID NO: 6132 - DNA, 876 bp, Glycine max
  misc_feature (708)..(708): n is a, c, g, or t
attttttcgccagcttgcatgctctgcagtactgcttgttcttttcattaatataatctactttgtttattaaataaaatcattcaagtagtcatattaagagatagttgtaaaggacattggtggtgatctacaactaacattatatggaagtgacaaaaaacaaaaaaaaaatcgattaaaagaagaaaaaaaaatataaaaataaaatctctttcaaggttttgagtacgaatagataactaaaagtagttgctaatagtaaaagactaacacaactggatactttagcatcggcgaagcgacgatctcaagatcatcattaacaaagttgacgctaatgtatttgtatcaaccaaaagaaattgacgtttaataacattaaaatactaaaatatataaacttaggactaaactaatgaatattaatattttaaatactatttatagaatttaattaccttaagaactatttaagaaaaaaatacttaaagaactatttaagaaaaaaaatacttaaagaaaaaattaatattttactcttaatattttactgatcacattcattaaagataaaatgttatttatataacattatgtacaaccaataaaacaacgaaaaaagagaaaaatagaaaatagagagaaaaatgagttataattaatagtaataaaaaataaccattagccacttattctttatatggnttatgttttaattttctatatctagaaactaatggttttagtattcatctatatacttttttaactccgttttattttttacatattttttaatttgattgagtctttacaattttggaccatagaaataaaataaattaacaaatggcacatgtacaatcaacaaga

SEQ ID NO: 6133 - DNA, 878 bp, Glycine max
cttatggcagacatcactgcatcaaagaagcatcatggttatacagaagtgacaccacaagaaattttctcttaacatcaattctactttgacatgaaaaaagataaacaaagaataaaaattccaaggaggaatgtttgtatgttatctgagagggacttctattatactcatacaatgagtatgacaaatgcttatgatcaaacttcattacagcattgatcatatgataaaaataaaaaacttacagcagaagtccatgtcaaaagttgcttgcttatgtacctgatattgctggggttagaataccatctccaataaccatggaagctcccagaagaaccaacaccaataataggttcttcaaaaatggtgtcctttctaaagtgtcctttattcttaaggccctttccagttctggagtaggcagtttgagcttaaaactagagatttgttcatcggcttgttgacgatttggaagcagactcacatttgcatacctgcaaatcagcgagtatagtgcaaacgttcctcctacagttgagccattaatgtatggaaattgtgaattacagcaagtctgaaatgaaccaaagcaaaataactgagggggaaagtgaatctcttaccttctccactgtcatttgctttgaggactataaaaacatatttcgctaatggaataagtgctattgtatacattactaatgataatgcccccaagatatcatcatctgatccaattggaaccttgctgaagacatcagcaaaaacatatagaggacttgttcccatgtcaccatataccacaccaagagtcttaaatgccaatgcatagtgggccagagggaaaggtctgatcacatagcacaaagata

SEQ ID NO: 6134 - DNA, 831 bp, Glycine max
  misc_feature (804)..(804): n is a, c, g, or t
aacgtcgctgtccgccccatgcaagacaacttgtcagagcacacactctttttctgaacacattaatttttcttttttaaaaaggtatagcatctttctaacatggaccaggaccaataataataataataaataatacttaatatacattcccataatcccatctcttctattttactttcattttattttattttatttctatttttaacttttattttctataaaattattgatcatctttatatttttttcctcctctttctatatttttcctctcaaactttttcattcatttaaccctgaaatgaagtgtatatttgttaatactaaaaaaataataataaacccacatctcatttttagacgtatataggtagaagaaaagagaattgagtatgataaatatgacaatgatgtgttgaaaaatttgttgaaagtgagttaaaaaaacaaattgaatgtaagaataaaacaactcatattagaaacattaaaaagaaagaaaaaaaaaacaaaaagcaacccctaatcacctcgatttaggaaacccgaaacccttcttgaatgagtataatcataagaataatcattccctaacatgccattaatcaatattataatttggttgagttgacgtaccttgtactttgttggcatcatggaggatatgaattttctcatcactggaaattccctccaccacctccaaaagcttgccctgatgacggcgcagcattattactattattattattattattaatttctttcagcttccaaagaactcaagttgaagccatngttgctgttctcttctgggcaacccct

SEQ ID NO: 6135 - DNA, 848 bp, Glycine max
aaatgatgctgtggatcatcagtagtttatgcgttgcatagcaagagagatgcaacaatcttaccattacattgaatttggttctcttttgtctgctaagctggaactgataaattgacatagtggtgtcattatggagcgagatagtttaaatgttgtgcaacaatttttgtggcttatgtttacacttattagtaacatgcatgagcacatcaaaaaatcattttggaaaggaaaataatgtgtgtgtatataatttgcactcagcattaacacttagggagatgcaacgataacacattaaaactctgaatttggtcttttgtccgctaggtaggaactcgttattgaaaaaagatagtatcaataatgtttgttaacttagtggcttatgtgtacacttataaccatgcacaagaacttcaattcaacaagtcatttaaaaataaaataaaagaaccatgtatatagatatttttcacatagcagttagatcatattttaattacttagaataaaaaattaaaggtactacacaaacaatttcatgttttggtttcagtttgttgttgacaatggttggcttgggtctcagttagttaatagcaaaggctactatgcattgatgattaactcggacatatgggtgtacatcaggaatctgcttcattgaacaaatgctgctggaattggtgcatggccacattatgttcactatgatacttttagtgttgcaagattccactaccacggctaccaatgcgttattcaaatcaatcaattcgcactctcttaatcccctcgatcactgtcatatcttttttcaagagctagcattaatatgccag

SEQ ID NO: 6136 - DNA, 881 bp, Glycine max
tgaaatggccttctcagttctcaatctttggctgaatgtgtctgcctgcaattacaattacaaacttcaccacttgtttcctgcatgagctatttaatttgccttatcaatcaataaaacagaaattaattaattaaactcctctgtctggtaaaactgatggacattctttaaggtcctttaaattttcttcaatttggcaacgcctaagaagacaaaaataaaataaaattatgtagagacaaaagagaggacaacttcattcatttatttgttgcagcaaacaagagtactacatgttagttcccgcaaatcattacaccacatgacacaacacccaactcatccaccttcacatttccaaacaactctaatttttttattaccttctagctaacggattcaacttacgtacattttctgtacaaaacacgagttacaatcagaacaattagacaagttgaatataacataatggtcaagtttattcaaacttttttaaaaaattaaataagtacttttaaattttttaataaataaataggatttatttcttaaaataaataaataaaattattttttaaataaaaaaagtttaaacaaccacactaaaaaacataaaattatttattttatttttattttaataaaataagtttaaacaaactagcttaatggattaattaattggcttaaattgaagagatattacatataaacctttattaattgatcccaccagttggtctacaggaacttgtctcatgtggtaaaaaaataaaaattggccgtgccctagacaggtagactgtttaattatttaacattatcgagtagtattaaaaaaagaaaattagtgctcaccttgcacatttacaata

SEQ ID NO: 6137 - DNA, 720 bp, Glycine max
tcgacctgcagttggcacgaaaaaactccatgcaattgaatatttatttcttcaacactcactataactactggtcttccaatgttagagcagggtttctcaatagagtaggatagattattacagcattttctagtaataaggatttctgtaatattctacatatagtttatatctttggtctaatgcattgttatggggccaaatctgaactgtaatatgtattactagtacccctggtactcaattaatataccatattatttttgctgagcaaaaaaaaaattgtttcatgctattggcagagaaagatgtcaacggtggaaattggcacagctcttccaaattccgattcttcaaatcacggagaaacacaaaaacaaaagcttgagcgtttctgtttcttttttgatacagttgttaaaaagagagaagagagcgaaagtagggggagggataattgggttgggggagggatacatgggtgagagatatgagagaggtggggggttgtatgggcttttttaatactttgtactaggaacaaaaagttgtcctatgattttttaagtaacaaaaattgaagtttttgtcctgtccatgtttgtttatttgtgctgacccacgaacctttttcaaaacaaacgtagaacaaatataatttgtcctgtccaataccatgtgttttaaccaatccaaccgttcctaaaaagataaaca

SEQ ID NO: 6138 - DNA, 841 bp, Glycine max
aaagaatttagtcaaaaatcatttacgtcatatagtttttaaaaatgaaaggacgttctgtttcttgctgtatggcatgcaaatgggagtcgcagcatgtttcttgccaagtgatttgcaatggactaaattaatctgcaccattactaacaattttcaaacaaataacttcaagtataataatttagttagaacataatctcttgagacattcctcagtaaagctctttttttataatttcttaaatagatttcaatatactaattgagaaaaatagttattgattctcgaacgagaaatattatgagttcataaaaaatattttattcattgtatttttgttctttatgaacttgaattatgcatgagttatgcatatcgttactaaaataaatctatttaattgaattttttttataaatcatataaaatttatgtgaaaagaaatagagagaaagatggaaaaatatattttattaagaattatgaacacacaaaatattaaaaaaagacttatttttccggttcacatctattgagtgtttgttcatcatttaaaagagaaaagagataccggtattattttataacgcgcttgcgttgacagaatagtaaacactagtaccaaatttattggcagcgtgtttgattttactattttggatttgatttaaatatgaacaaaataatgataaataaattttaatgtaaattaaactaatattttgagggttttggcaatttagtacacttacaccaattcctttattattcaaaaaatattacatttgacgctcctcacacattaaatgtaatttgttcaactattttaaaaaacac

SEQ ID NO: 6139 - DNA, 855 bp, Glycine max
gggttccccaagatgttctgtctgcccccatatcgtatgcagcttattcctgcaacagtcagttaatatatgcgacattttgtgatgccaacattggcgtttttgatgctgatagcttgaggcttagatgtcgtattgcaccatcaatatgcttgtcaccggcagctttaagtgggtaagtttcagatcagtaaattggactaaacttagtatttattatattaaagagagcaatgcacttttctcaacatactctctattatagagtatatttaatgtctgttccaccaaataagctgctctacagtttatttagcgagtcccacatgcaatattttactatattgatatttctcatgtattaaatattaaaaattttgttcaaggttgcttactagctatgtaaaatggtgcagtaaaagtttgcttagtaatttattacgaacatagttactgctgtttcaatttatggatatctttactgtcttttttgtggaggaaaagaaatccttcctcaaacaagttggtgtgacgatttttcatttgcacttgcaaaacttgaggataaatcttgatacttgatccttgtatattgcagaagtcaaggtgtgtatcctcttgtggttgctgcccatcctctagaacctaatcagtttgctgttgggctgacggatggatctgtcaaagtgatagaaccgaacgaatcagagggtaagtgggggaaccctccccacctatggacaatggaatattgaatggtagggcagggatcatcatctacaacaagcaaccacacccgctgatcaggctcaagataagacaaatgtattttactagttattttcatctgtaaat

SEQ ID NO: 6140 - DNA, 812 bp, Glycine max
taaacatgttatcggacaactggctggttcagccttgtttttgctcatgcaccctattgcaccagcactctccacttctaatccagtttttctgatgtttcttattgtttcaggtggcacgaactgggcgaattgctctagtccgtgagtcaggtgtggactccaagtacttgcgtggatactcttatcctttgtaatcacttcacctgggtcgaagaaccatcaaaatcttaggattttagagcttgtactttctcttaaactttgcctacggattcttgccttctgaactataatgttaataagtccttctgtgattaatataggcttgggatgacatctgagattaaaaaaaaaggttttcctctcctcaacttggcttcattttttggtggaattacagtttactattttgtgtagggacaaattttttgcttgtcaaaatatttatgtttcttacttggatgttgtctgttcaaaattaaattccttatattaatgctgtcgaatcctatgttgcttgcattaggacattaattttattgcttatccaattgtgatgtttttaaacatatagtaatattttctcgtattgatttcttatgataataccaagttgccaacattgcactattttattgtgcttttgttcacacggtattttaatgtatcctgggtcaaatattagattgcgtgtaataatataaatatattttgtattagacgtgggatcaatttacatcaaggatagtccttttagagtaatttttcgtcattatttaatcaataagattaatgacttatttatgact

SEQ ID NO: 6141 - DNA, 840 bp, Glycine max
aattctttgagcttaggatagtaagttctgtcttcaactatcctaagagctagttctcgtttaatttcaaaccactgagagccctttcgccagtcactcacgttgatctcaggtgccatgtttccatcataccggcctctcccataaggaccaggttcatcaactgcacccataaagctatatcttgagtgtgctatgtaacggtacacaatgctgaagttttggaggggaatgcaggactccgataagaggataaaccattcatttgagatatcaagcaatgcattagccagaagtcttctttcagcatcacacatactcatcattccccactctgccacctgtgaaggtgaaggagaaggctggttagaaatttctaaaaaataaaaatacaaaatctttaaccttaaacctattcttggtctaacagtcacattatcaaaattgaaaaccatggcacaattcattgagcacatcaaggagcaggagttgatattttgtttggttttagaagcatattctcccaatgaattggtggataataagaaaaaatcatacaataacagcatgtttgattgccgagtgtaagttatttcataatttccccaagcttctatgcatcacacacacacagagcaattctcatgtcccagttttctagtctaacaattatcataacatgaattcccaaccttccccccttgtaacaatttacataccatccaatttcagaaacgtatgttttatttccatttgccatcaagaaaaccatagaccaccagtggtatctgcatttcaatggggtccttctaaaatatttattaagtaggctttcaaacc

SEQ ID NO: 6142 - DNA, 832 bp, Glycine max
aagaagttattgatatgacaaatgccatgactttaactgactaatgctcttggtccaaagaatgaagaaaaacttataatttatatgctgcttggctttctaattagtttttttttttctctttttgttctatatcttatcctcattttttaatctccttttcctgggggtcaagtttccttatttgaagccgagatatttgttgatgttgttagcaggcagctcgagaagaagcttgggctaaagtttctgttcttgagcttgagataaatgctgcaatgcgagatcttgattttgagaggcggaggttaaaaggtgccagggaaagacttatgcttcggtaaggcttgatttgttgttgtttataatcattggacatctgcaatttgaaaagtatgtaggatttccaacatagactgcacatactggcatagaatatcagaggacacagggcagcaccctagctgctacttcttccagctacttgtttgttgcattctttggatttttgtgttataataattactaattattctttatgtagattgaattaaatagggattctaagtctttctaataaaatcttcaaagaagcactaatagtagggttttataaacatttctttcatggatcttaactaatttttgaactgatctaaaaaggaaattggataaaaaggatgtagagtcatgttcggcaagattaggatttaaggaaccttagaagatgtttttagagtatttgttgctcataaacctttttctattcatacttcatttattataattgagtgcaagatcaaaagttggcatctctgtaaaggggctatgc

SEQ ID NO: 6143 - DNA, 844 bp, Glycine max
gcttcatcaaagaaactgacaaattggctctcacgaacatgtcaccaagacaatccttgcaattcaatagtataatagtactataatcacacagccaaaatggaacacttgattccaaggcctcagatcttttatcccttaattttcccaccaacccaaaagaacatggtagagaaaaagctgaaagaaaaagggatcatgaataatgaggatcatgttggtaccgtttgttggaccccattgatgtaaatagcttttgagcaagttgactctccagggcacaaagcagaggttgtgacatcaacaagaacagaaactgtcatctcctcagctacccaatggatgctaagtggcagcagcaagtgaagcaaaggcctcagttctctgaggccactcaaccatgacatgtttgttgtgcacctttgcagcatcaaaaagttgtactagtaccttgttctgggacaccacacgtaagaaagtggttgtgtcagaaactgagcattgggatttgtatccaagtacagagggaaagccttattatattatgattataaaaattgactacgaaatcatttctcatgtcgagtgtggtcctgtccattggaaagagagtggcaagaacaagacaccatcgcaaacaaagagactgtctacgtgcctacacttgcaccaaatattcatagagtatagtttataatttgtagtaactatagcagtatttttttgccggtttagatcattatagagtatagacaattctaacgattgtagaacactgtaaattataacttacagtacataataaaaaaaaaaggtcgtattctataaatatgaattactttat

SEQ ID NO: 6144 - DNA, 894 bp, Glycine max
ggtaacccggggtatcctctaggatcgacctgcagcactgtttggcccttattcactcaaccccaatgatgggatctcctttggtcttagcatagtgtgatgactatgacaatggagaattggagcgtgccaaatcgtagatgaagggggctcggatgaagaattgagtggattagtgggggtgacatagaggttagggattggagggatatggttggcgattcaaattggcaaaggaatatggagtatgagagatagcgatttcggcatagtggtgctatgaactcgtgttcttggtaggttaaaggaggggttcagtgaagaaggagaaggttaaggaagcatatgttactatgtcgagcgacactaaactccagaattaaatttcaaaaagggtaattttagaaaagaaaagttgaaagggggtgttaaagtaagtgcaaatagtaatagccaacttttcgaagtaataataaacaactctaatttaatcttagatttaaagtagatggggtagaatttaacggaggaatttaagtcccctttaatccaaaagcgcatagtaagaaaaagatggctagcaaacctagtatttggtacttccaattatattttctttttacgaagaagtgcaaaaacaaagtttgcttatacctatagcattttttttaacgcaacaatttttttgactggaatatggctgttcacggagtcaagtcaacaacttccaaaaatgttgttcgaaaaattcagagggcaaggaaaatcttcagataaatgaatagaaatatttaaaaattaatttggagctgggaattttttcccattccctaattccaataatgacaaattgacaaatgggttttataccgaagtaccgcaagggccagggaa

SEQ ID NO: 6145 - DNA, 1541 bp, Glycine max
cgccagcttgatgcctgcagtggcaggcaaccccatatcatatttcgtgtgaacttcaagcagagattttagctttggcagctgcatgatattccaaagacagtagaaggagatgatctagaagaaaaaagccaggatttggaggttgatggaatactcaattatagattgtatattggtttttattaatttcacctcgtatgttgttttgtcgtacattgccccgttcattcgtatagaaaccaatatttagtactttattctgctgtaatagtgtgcatagggctttcaatttgaactccgtacataactaatgagtgtattcacaattacaccaaataaaatatgaataacatacagaaatgagttctatggaattgttatattgtatttctttgtggtcagtttgtataacatttgaactctaatgtatttatataaattaaactctataatgaaaatttacgaagattgagaaaatagttagaaattaacgagtctaaacgttatggaaattggtaggaataaaaggaaacgttatggaaattggtagttattaagatcgatgaaaataaagagaaaagtgtataaaaaattgtctttgtaaacccgtaatctagtgtagaatatgaaagtaataattaattaattaatgcaaaaaattagagtatctaactaagttatgctttattaattatacttaacaaatagtacaaataataacctagtattgaatgaatgaaatatcataaataagtcaaatgtttaatcttttgcatgcatgcgtaaaaaaaaacttttgcatgccaaacaccagtgttttggcctttcggtgaatgcaaaatgtgagttttttttttggtacatacaaaatgtgagttgataattgaaatattaaaggacaagtgatttcttcttcggggtgatagaaaaacggtaagtactaattatatttgcattgaaggtttgtgcaaaacaaaatcttcaatgcaagtataaaaagaatatggacagacaggaaagtggatgcagttttgggcagctaaagaaacagttaggagcatctggttcctgattaagtagcgagaacaatgggtaaaagcttatgttggacgcaaaaaagatgtgccactaataaaaggtagagtgataatttttctatgataaatactaatttttcagtctttcttctttacatcattagtcttgtctcgtattcaacttttggattggcaatagagttgtctgagacccgagaagacagcgggaatggattcctcatttaatttggcttttcttatcaatggaagcccatgcatgcacatagatagatgaaaagtgaaaactagtctcctctatatatccttgtcgttggttacacgtttggcctatagagaaaactaattttcaaaaaatgaatggtaaacataaaactggatcacggagaaagaatgttcctttccccgcaaacactagtacaactcgttgccttttttcttctaagatgaatagttcaaagcgtgctggggaagcaaaattta

SEQ ID NO: 6146 - DNA, 849 bp, Glycine max
agattttagctttggcagctgaatgatattccaaagatagtaaaaacagatgatctagaagaaaaaagccaggatttggaggttgatggaatactcaattatagattgtatcgtgttattttttattaatttcacctcgtatgttgtattgtcgatttgtcgtacattgccccgttcattcgtatagaaaccgatattcagtactgtattgttttcttttatccacaacactgctgtaatagtgtgcctggggctttcatcttgaactaggtactaaactaacgagtgtattccccaattacaccaaatgaaatatgaacatcagaacatatgtatacgcaatttaggcccgtatatatatagtgagtatactgtactctctccgtctccttcccataacaatcgttatgtaaaaataaaaaagttgtcatcaaataattgtcattttatctttttaatataacattaattatattttttttacttatatttcttataatattaataagggtttgaaattagtgtgttagaatattgattaaagaactaaaatgaaaaaatatttagtgtaaaaattataggagagcctaaaaataatcatgagcattgtaattttgagcaatttaataaaaacttttttccttctagtttttaactaataccttaaaagcattagttaacatttgttcattaaaaatatgactataaaaacaaaaaatgaattaatgatgataaagttgattttctaaaatttaatttttttatctatttattaatttctttttggatatgtaaaattacttagaaagacaaattatatgggacgatttgtatgggatggagggatac

SEQ ID NO: 6147 - DNA, 849 bp, Glycine max
aatctgacaatgaatgaggatttgaacaggtgggaatgctgtttgtgcgttgtcgcggaggcataagtcactctccacaagagcatgtgctagataatgatgtctgggcagctggtttagcaaccttgtcatttctggaaaacctatcataagtgatacggtaactgtgtaaagcaataaatagatattatagcttgtaattataggttaatttattgagttaattcatgagttaactcttttcttttagttgcttgtgtcttatagttttgtaattgaatttttggttttagttatcctgttatcaggaaacggctccaagttgttatgcatgttctttgccactgtcagattaaaacttatgactgattttatttttgaatttaataggtatatactatttagtgtaaatgtcatcaagtcattttaggacagtagaaatcaatcttggtatgacttgtaaggtagttagtataaaagtaaataaacttgttatgcataacggtttatgattaaattacaatttaaaatatgatgcatgcatgcagtatttattcccacacaaatgcttagctctctgtattggaagttgaaaaaagttacctaatacatgttgctttacgaattcaaatttgtttgtcaaatcattaagaaaatctctttttggacaatgttttcttaattgttaattcattttttgtgattgattctttaattggaatgacatgaaaagtgacaagaagaaaggacaccatattggattccatacttacacgaacattgagtattttatagggagagtattggtacgtagagttgcaatgcatgggacgcgtaaacttaataata

SEQ ID NO: 6148 - DNA, 824 bp, Glycine max
agcttgcatgcctgcagagtgaatgaattaatcaatttctttgatttatttcttatatactacactacaatttttttcccatccacccatttatgattgtctttttcctctgtccatcaaccaaacaattaaccatgttctaaaacttcaattagtgcgtactaatttggaaacatttcagaatttactatttaacacaaggtatgtatggttatgtcagagttaattctctttgacttatttgacacataataaaaatagcaaaaacagagacatattatattacctgatagagccaccatgtctcttgtagaaaacccacgttgtccgaacatcttgatgagctcagaagcattgaaaatgggtgcaggtagattgatagtatcctcaattttggaccttgttccatccttccttccttttggtatgtcatatacaggaccccctgcctgcacatgtcataggtaataatgacattaggtaaaattaattgcaattatttaagaatttaattagctccaaaaagtattttatactattattcaatcataaattattatgaatgataaaatttttaacttttattatttttttttttgttgaaagaaagatatattcatagtcgaaaggcatcgagactaatcctcgagacatcaaaataatcaaagtgtgttttttgtctttaacaaaatcttttttataagcacggccaacgaattaaacttatgttagcatgtttaaacaatctaattatctactaactatattaaactttaatgggcatgttaacttttgtcatagtttctacaagagttatatacaag

SEQ ID NO: 6149 - DNA, 855 bp, Glycine max
ttgcatgcctgcgttcaattaagtagcgttttatttctatagtactgctaacaatcaaccatcttactgtaaaaattggatgggtcctatttatggtcattggagcctcctaagaagatatattaaatttatcaagttgttccaaaggatcaaaacgatcacttattaatggaattccttgtgttgactctctgtaacatatttgtttgggtaggggcttcctaatacatcgcaagctaggctcagacaaataaccaacatgcaaatgaatacggagagcagactaatgttgtgaataatctagtattggatactggtaataatatcaacaaaagaacgttctgttgtgctttcagacatgctgaactccacatattcttattcttgtacagcagtcaagaggggggtcgatttcataaaagatgagaccagtaagtcaaaatttactgaaatgtaatccttgttagatcgtccattttgtatcaactgtgtcttttgagtttactgaattagttcaactaattgagttagacattcttagtactaatataacattattaagaattttgtgtcattgattcaattcgttcaatcaattaatttagctgttgaatgagaatcaaacaaaaatatgacaagttgagtgtgtgatttgtctgtaccattaaaaatactaatgtattcaattttactttatgtactattgagttgaaagtgtcaaataccaaacaaaatttctacgtatcaaaataatattaacttttaaaatacattcgcaaatgatataacacttattggtattattggttcattttgtaatgattaaaatatccatcatcattctaaatacttgtt

SEQ ID NO: 6150 - DNA, 799 bp, Glycine max
tatgttagcagttcatagttcttaattgtgaattgtattctatttaaaatgtgtctgtgaatagtgttctgagtttaaatgcatatataatatcaacactttgaagtgaataatttagtttgcaatcacattattacttctagaagattttttaataaaattgatacagtcaaatgtcatatagttttatgttttctcttttaaacattgttttgctgcaatactaatatactgatgataacaagttcaaaatgggttgtgtgcacgtgtatgcattgcagtttctctagaatgtgcttgttgctaactacttaatatcaactgattcaattttaggttcgaagcacatttggaagttcatgcaggatcaatagatgaggaggaggacgagcaaggaattgcacatatgattgaacatgttgctttcctaggaagtaaaaaacgtgagaagcttttggggacgggagcccgttcaaatgcttatactgatttccaccatacggtgtttcacatccatgctcctacgagcaccaaggtatgggccatttggtgtgcatttctttgtgatatattcaaatattagttctttgatgtttttcatttacaactttggatgttttccagctttgttatgttactgattattaatttaaattaagaatatgagaattgggtaaatgatgtttcttgtgtacctctgtccaagcaatatgtggaaaattgttgacattatattgaatatgattaattcacatttttgaacagcacagtattcgacttacatgtattttttttttac

SEQ ID NO: 6151 - DNA, 817 bp, Glycine max
gccagcttgctgcctgcagtatgcctcacttgataaataaattacacactggcattatattcctccttcatagctgttattatgatgcttgctttctttttggtaatgcgtgttatgaactgataatattgatagcatgatgattttttttatcaagtgtcaaaatacatcttatgtcaccaagttcctgcactaaatattaaaaagaataaagaaaaatatttgaagaggatacatatgaaaatgaaaacattcttgtgttagatactggtatatttattttaaaatttgtttaatggttagttcatggtttgttaaaagagtccaacctctagagtctttgcacctgttgctaaggctctcccttctattaatgtattattgatctgaatctgtacttaattatttataatttattcctttacataagtgaataaaaaagtctcataactttggcaacagttaattcaatttatgccactggttatactgaccaacgaaatgatgttaattgtctaagtattagctgtgctggcttttcccatctacaagatttctgtacttttttcaaacctcaattggtcagtgtattacttacaagttaataattgaacacctttcttagtatttccaattaaaatattataatttatctctgatctgaacaatccctatttaaattatgattttggttggttacttccacagaacggcttttggtttcagtttcagtgctgggttcttttttcattttcagtggagggcagttgtatatgtggggcaaatttaaagaccactgggatgactgggatgtatc

SEQ ID NO: 6152 - DNA, 842 bp, Glycine max
atatcatttccttcatttgtgcaattgcctctggatcaggctcttcaatggaagaagaaatggatgaatttggttgctggaaattgatattatttgaggaggaactcatatcccatcttgatttcttgcattctggttgattaatatctgagacaagtctgaaaccaccttcttcaataggagaagaattttgaacaatactgaagcaggaatcaccaactttgatcattttagattgatcatgggcatgactcctctttgaacaattagcctctgattccactgtttgagaaactgtttcatcaacttcaatattgactggactacactgcatgtctttgtttctaccattggaagcattgctctcagactcacctgtggaagctgcactgccataactgaagttgttccacaggtttccacagtcagataaaatcattgaaatcccatcatcatcttcaacagaagtgatgtctgtgttgctgttggtagctgaaatcaagcagtcaaaagactctagttgttgttgttgttgttgctgctgctgctgctgttggtgggccatgtagaaatctggcatgtagttgctaatcaggttcatactgtgaggtctattgactgatagggatgggtatgattgggatgttaaagtttctccccaactggctccagctcctggctggtttcactggcatgattgacacatgctgtgatagattttgtgtcttgtttttgcatcacatccatcatctcagaggaagtgggtagtggcacctggcccgagtgataaatccctctttcagaatttgaatatgcatgacctgtttgagctttctgcatct

SEQ ID NO: 6153 - DNA, 841 bp, Glycine max
  misc_feature (766)..(766): n is a, c, g, or t
cccgggttttcctctaggatcgacctgcagtagatgccatccctcagtgcagaaacaaagtctcatgtgctgatattctggccttggccacccgtgatgttattgcactggttagttcttcaataacactccaattcgcgtgagaaaaaaaaaacatagtttaatttttgggattaggaattaattttaggtaaatggtgaatttggtgcttaaaagtgtaacaccaaaagttaataaatattcttaaaatattgattataaaattaaaagaaaaaatatttttatcaggatacctaaaatacattaacatgaattttttatgttctcttataatttttatttaatcacttagcacgtaggaagtacaacaatcaaaattatatgattgtgacatttttcacacatttgaaaagtaaattgttactgcttcacatcttcagaaagtgggcatttatccaagttaatttctttgaagattggttaaaaaatgaactaacaaacgcatgtgggggtatgtgtgtagtctggtggaccttcatacacggttgaattgggaagatttgatggtttagtttcaagaacttcggatgtgaatgggaggcttccacagccaacgaacaatttgaaccaattgaattcactgtttgcggcaaacggcctcacccaaactgacatgattgctctctcaggtaatctccgtgcaactgtttgcaaatgggtccattttgcgtttgtgcacgttcttgggtccttgttagaatgggntgatatttgataatgaatcttctcatttatgttattgcaaagtatagtcaaatgaggagattatgattcacgagc

SEQ ID NO: 6154 - DNA, 851 bp, Glycine max
ttgcatgcctgtcagtgggagaatccagggtgtgcgcacctgcaacaaaaaaaaaaaagggacaattaggcacgttgatggatggaggaaataagtgtagtattttgttaaacagtgtcctaaaagtattattaaaaaatttgaaaaaaatatttattataaaaattataaagaaatgcaaaaaaagttataaacaaataattttatacatcttaataataataataaattcttttattatttaaccatgtttaaaaacacttgttagcatttagataatcacttttgataaggatttgagatctgaacgcgaggcttcgttttctggctgctgttttggctgtgcaacttgaatgcaagctcacaagcgttaagctcggttttctatgttgtttgattcagtggcttctgattcacaaatgactgtgttttattatatttaatacacgaatctcttactactactacattattttatcgttgtttgaacatttatagaacaaaataatgaaaatcatgtttcaaatatttcaaaataaaaataacaattttagattttaaaaaacgactgttataaatttcacttttaaagataaaatttagaacaaggtcttcacatttatgccatcaagtttttttaattaaatgataacaactgaatgtttatttaaaactgtaattatttaaggattttaacttctacatatttaaatacatttaagaattgacgtttaggaaacatattatttaattattacgtcaaggatataatgaaaattagatcacaattaaaaaccgttgttaagggaaactgatttaaaattttgagaaatttttagacagcaaacgac

SEQ ID NO: 6155 - DNA, 836 bp, Glycine max
gccaagcttgcatgcctgcagtatatggagggttgcgccagtaggaccaatgttgtttccataggcaggccttgcattgaacgaaaaatggttgtgcatattgtgtaggaaaatgaagttccttggaacctggagcaggcttgctcaattctgctacaagtgctttgttcctcctaacatatgacatacatacatacacacacatatacatacatacatatatatatatatatatatatatatatatatattttcagcactagtttgaaataatatccttgtaagatatttaaaatatatatatatactttttgactaaataaggatgttaagtaacactattacactacaaaccaacttacctacatagtactgaatttttgtatatatcagaaaagtcaacattcaaatccatttctcgtgccggagttgtaatttccaacatccaagctgctgggttatgtccatctttgattttaccaaccccttcaatcctctgcttgaaagtaagattagaaatagtactatgatatcagtagcaactaacaagcatcatgaactactataaatgtcatttgatttttccagacacgtcttacctcaaaatactcaacgaggtggttagaatggcgacccaatggcccaacatatatttctcgtcctcctcgctttagtaggaaaagctgaaaccaatttttgggtttattaagctcaagtagtatggcaagtcaaagaagaaaagtgagaaaacgcagtatcatatgatcaagagcagcacttacctcatcaaaagcttcaaaaatgtctatgcttggttgatggatggtacaaacaac

SEQ ID NO: 6156 - DNA, 825 bp, Glycine max
aaatctaatctagggttccacttccaagctttgtccccattatatttcaatttcaacggatgtggcatggctgcgcataatagatgccatgcactcacataaagttgtcattattcaattcattaaatgtaagactcaagctgtgaaatatgtggacctaattatcctcgtttatactatttgtaactcgtcacgattaccatttgaccaaaacacaaaatgatatattgaggaaaaaaataagataactttgcaggtgattttatcgtccccacaaattcaaaatactataaaaataaaaattgtcatgacatctaatattgctttcttcaggagaattatttttaccactaaatcatttgcttctgggtgttaaacaagcggtgcgttcaaatctgtaataaactacaattagttttagcttttttttttttaccacctcctatattttggaaattaattttcagaataattttataatttagaaattaatttttagaataaaaaggaatgtaattaattttttttatgtactgttaatataagaagtcgataaatatcaatccaaaattataataaatatgatctttataataattattataaaagttaataaacttattataaatattagataataatataaaaatatttaaactacatgttagactattagtgcattagtgcatgaattatttactcttaacaaattagacttagttaagtttttagtttttgtaatttagctcttttttatttttgttcttaaaataattttttatattttaccctatagtttcaatttttttttatttttaatctttt

SEQ ID NO: 6157 - DNA, 1031 bp, Glycine max
cccttatcagtaaaacaataaaaaatcttatctcataaaaaacttcgtaccccattgcccagaggctcttcgctatgcgaaggtatgggggagggatgttgtacgcagccttacccttgcatatgcaaagaggctgtttccggattcgaacccatgaccaacaagtcaccaaggcacaactttaccgctgcaccagggctcgccctctaaaaaatcttatctcatacaacacaatttttatctgttgaattccaacctaagctacaggaatataattctataactcacatttaaacaaatttgagacagtcttccactcaaatatataaatgtccattgcccaaccaaagaaggttccaacgctactgcttccagaaacatctgtttttggcaactgatcatcactaacctgcaatttctgtaagagttgatgacaaatggggaaaagaaaatttcatccttttgtttttccttttaacatacacaaaaatttagaatcaataataccttaaacactacttaaactcaatctttagtcattaagaaatattgttaatctccctcacccatatatatcagcaatgacctaacaatggttagcaataaccaaaaagtttcaaatcatgaaaataacacaaattaaattttatttgatgttcaggttattcctattcttataggatacactaactatatcataaacagtcaggtagatattgaaacaggggttatcaaatagttaacaaagttgcgacttgaattacctgaaaaagctttcatccaacataaatcacaagttgttgtcgtgggtttgaggtcatagaattaattctttcatctagtggttgaagtagattgataacaccaagaaaatttaatgttgaaacctgaacaaagactagatgcatttagatttcaatgatggcactcccaaaattatgtacaagactactagtagaattagaatggttaccaaccaaagagtattcttcatctttaaagctggtgcagattgtgttacaatggttgaa

SEQ ID NO: 6158 - DNA, 795 bp, Glycine max
agaccccttctcccggattggtcgtcggactctcgcattcccagaacgacaccgttttggcatcggggtcgccgcgcggcgacgccgagggcgcggcggggaccgagggcgccgccgctggaggggacggtgcagggagggattcgtcttaccagagatatgacattcagcatgccgccaggtggattgagcaggttttgccgttttcgttgcttctgttggtggttttcattaggcagcatttgcaaggtgcgctcttagtttttatgttttgagttactgttctatccgagaatttatttatttatttgatgttgttgggtattgcaatgcagggttttttgtgaccatttggattgctgctgtgcttttcaagtccaatgatattctaaggaaacaaactgcgttgaaggtgtgatggttctcatgcttgaagcaatgtgttgttgttgttgttgttgttggttagtgtatggaatttagaatttgtgttgtttataaatgtgtgtggttttggcgggtgcagggggagaggaagatgctggttttggttgggatttctgttgggtttgcgcttcatgtggttggtgtctactggtggtatcagaatgatgatctaatgtatccattgatcatgcttcctcccaagggatataccgcctttctggcacgcgattttcatcatcatggtcaatggtggggttctctaattctcttcttctccctgagattgcttgggttgcttactgcatggttttaagggcattttaattttgtcgcaacttggcgattgac

SEQ ID NO: 6159 - DNA, 856 bp, Glycine max
agattatacgcactttgtgtcgagtaaatgccgcttggctccgctttccaaacccactcatctcttctacatggatgaactgtcttgccctcaatatcatttaaaaagctgtcagcaatggtaacctcactatcaaataatgatctcctccacctaaagtcccattcccacccagaatttgtgtgagctcccacttgctgtatgacgtggttttgctgattggaaatggaatatagtcttggatactttgctactagagatatgtcatcattaatccaattatcctcccaaaattttatcctatcaccacagccaaccctccacgataatccattctaaaaagcgcttgcaagctgttgatggtggagggcctgttttaggtcccgccaccaaatggaatcagtagggtccgaagatgctacattcaggttcctccaacctccatattttgactctagcacctttgcccataaatctccattgtggtagaataggctccatttccattttcccaacagtgcaagattgaagtttctaatatctttgatgcccagtcccccttcttcctttgaacggcacaccgtttcccacttgatccaaacaatcttattttgatcagctccgccaccccataagaatcgtctttgtaatctaaccggcttgtctaccactttgcaagggaccctgaaaaaagagaaaaataaatgggaatagatgttaagatagactgtatcagtgtgaccctccccccaaagacatgtttttgcttccactttgataattttctctcacacttgctgataataggatcccatagttggcatcgccttgggttggcccaattggttacccaaat

SEQ ID NO: 6160 - DNA, 819 bp, Glycine max
aattaagctgatttggatctcattaccaaatttcaaaacctggtgaaagttagggataagcacacagcaaaacatatacctatatagaaattagctaacatgaagcatgtaccatatacacacatgcgtatagcaagcatgagctcagaagataagacatcattaacacttcaattcagggttactcacaaaaaatgactggcagctgacctgatatcaggtgagtttcacagcaattcctgattcaaaactgatttttacttcgacgggtgtagggttgcacaaaattgcaaaaagtaaatgcaattgagatatcatttcataagtacacgttaataaaaattgcataaaaactgtatcggatctattttcaaatcctttgatgtattccgaaactgacttgtctgattttcaaaactagtgggtgcagctgaatgacaattatttttgtgtgcatgcccacctcgcttttttatgcttttaaaatccccgtcactctcactgtcagaatcatctgctgtagactcatcatcttcatcgccaaaagatggtttaactcttctttgccgactagacctggtatattttcgatctttggaagatcttatacttcgttcaattttacctcgctgccttccctttgccttcttatcaaagtatgaatcatcattatctgaaacatctattccctcatcagcttcaactgagactttaccttcccaatctttatcctggaattatagttcaattgcatattttaattatagtaaaaaacatccaggaaaaaaaactgtatatttacttcaactttaacagtaa

SEQ ID NO: 6161 - DNA, 850 bp, Glycine max
atccggagcaaccttggtactgggtgttttggtgtcagaacttgtaactagctcttctgacttctcctctgctcttacgccaagcaatttcctcatgccaagggcaaatgttcttgcattggcaagcctttggatatcagccaccaatttctttatactatctacttcaacagattgataactcaaaacaacaccatctggatcataatgtatatgtgaatctatgtcagatgtattagcaattcgtacacctgaaccccatggcgtattattgatccctttctgaagctcccataaatccctgaagtgctgatcatttattttaacatcccagtacatgcaaccaggtctgcccagtcgcaagcatatatgctgccatgagtcacctctagcaagtggaagtcgaaaccaaatgttagatgatccacttctcaaacccacttcttcaacatatgagatgtctaatgcatccatctggctggttagtctagcatgcttaatgcaaagtgaacaatgcctgaccacatgaagaagagccgcaatgtaaatgctagatggaacattccctttatttacttctgcgattaaacttccataactgtatccttcttttttgggtattatttcagcggacatgacaccttgtggcaaagatagttgacagccagctgaatcagaaatttttcttttcttgcagattcctgggttgctttcaacaccttgaagagatggaatcaaggtcaacatatcccgaagctgttcgttttctagatttcctatcatttttggaggaaacatcttcacctgtgttatagcctaactgttgattccagtgtttgggctggcaaca

SEQ ID NO: 6162 - DNA, 885 bp, Glycine max
  misc_feature (864)..(864): n is a, c, g, or t
gagtactatttggaacccaaagtttcaaccagaagacttcatcgattctggagaaacggcaaagagaaataatattattaatattgtttcaggtcatgatcatgcagctgttccttcagagaaagaattgatcatagaaaagaaacaagatttacaagaagcaaccacggcaacaccagcagcagcccaagataatgaagagaaagacaaagcaagtgaacattttttagacttggatcttactttataaaattatactatattataagaataatatgcatttatatctgatgaattggctatgccctatactatatgagtatatgactatgatttgctaaccttactaatgtctttgtaatccagttttcgttgctcttgatcatgattttgaccctaaagtggttgttgtacattgaaaagaagctatcatatacttagtaaattgcggtcaccgatttttcattattatctacttgggtatgacttctctcttgattacaaggaaaatccaacggaagaaaaacatgcatatgagctttgtgggacccattagtagtaatggatctcatgtagtatttgtttctctgctgttgaatcgagaatatttttcctagttaattaattgtagtatttatgtttatgaggattagtaaataaattattgagaacctttaaattataattcttttttatcaatctaatcagcaaaagaaagttttggttttgttaatttatttatcttttttaaagtttactacaatattcactgttatccttttcgttatacttattctttatttaattcttaaaatttatatttttttcataattaagaaagacatgcccagcggagcttacggnctgacccgtgtaggtttatcc

SEQ ID NO: 6163 - DNA, 882 bp, Glycine max
ttgcattgcctgcagcaaagaaggattgcacctgacaaccacaccacaggtaagagaagacccactagatgcaaatggatgcaatccacagatagtttaaaacaaaacaataagacggagtacttcatcaagctatagttaaatgacatcattatacttggggacccttaggattttctaatgaataattgaacaactagtcaattaagagtcataacagaaaaaaaaatcttccaaacatctcagataaagaaaaaaaaaggttcaaataaatataaatatataattcaacgggggagagagaaattgtggaggttactgatcacaagctacattaaaataaaatagtatctacatgcatttttaaaaaccaacacaccttttcaacaacagacgtgagtttaaatgttagatacaatcctgtcatcagtgatgaaaagaggcttccatattctttgttcaggaagaaacgataccaaactggtgttggcaacaaggcacggtaaagcaggaggaggtattcaactaaagtcagcatttgaccctgacaaaaaaatgatagtaccatcagaatgtaatgacatgagaaagatgatatagatcctgaacccataactccaggaaatgttacaaaagatagcagaggcacattgaccataataatataacttgagaagaaatgcgccatcttaaactgctcttccattccccaacggcaaatgcttagattcaatttccctagttcttcataatttataactcacctgcttacgataatttcggcctctgctattcttgtatacatcaacatatacacttgaataccattgcagcctggcgaaccaaagtatctgacattttaaacacaattggcaagcagag

SEQ ID NO: 6164 - DNA, 833 bp, Glycine max
gctggctatgtatcttgcaagtttgaagaaacattactggtttagtgcattggtaaggtatatttagattttaattttgtaaaaaaatatttaaattgatatttttttttaatttgtgtatattactttttatccaagttcctttattttactatatcatggctcttctaaaacagttgaacctatgtttcttaattttgtaggaatatatgcacacacacacacacatatatgtatgtttgtatgttattgcacaactaagttcaaaatattactttatcaattcttcattatggtctgatttcagaaagaaagaaaaaaaacaacttttatagaattagttctatcattatattcatagctattcttagttcaaatggatctttattatcccttatctcttgtttattttttgaaaggctcccttatctcatgtatgttaattctagattataaacttcttagggcctctatgaatcctatttttgaaaactatttggtttttgaaaaaaaataatactccctttgtcccataataaatgtcatcctatgttttttttacacagatcaagaaaagctaataaatagatgaaagaaagtagtaattttacaaaactaaccattttattaatattacattgaaaagataaaatgacacttattttgggacttattttttcttcttatacgacacttatcatgggatggatggattatttaataagagtagtttttgagaactgttttaaaaaatacatctattttttaagtttataatttcaaaaaacctgacatctctaaatgggtttgggttttctactctcagtttttga

SEQ ID NO: 6165 - DNA, 854 bp, Glycine max
agcattggaaaacgaagtagagggaggaatgaagtcatggttttgcggaaatggttgatggtgtgagatgagcgaagtgcagaagccacgggacgagaagaaaggtcggaatattgcatttttcatcttctcattgacatcgccggagccaagttaagtaaaccgggtcacgggtcagagtgtcgacgatacaatgggagatataaaaaaaaatgtggagccatagcatttaatataaaaaaatcaaatttaggaatatcagtaagctaattaatctaatgattgaaattttttatatcatatttacttttaacattttttttcacaaaacgaaatatttcaagcgaagattctttggaggttttttaaaattggagactattcaggttcgatttgataacaaaggcaataatattttttttattaaaacttagtaggcaataacaacttctatatgaaaaaattacctttattgtaaaattaattttaatggaataaaaattttaaggtttggcttgaccgacataaaagtaaaagtctggtttaacttatgagtctgtttaaaaggccgtttaaagacgtttttatcaattatttatcttaaaacctagtgaaatattaattaaaaaaaacttataaaatttcatataagtaatatacaaattcaaaaataattgataagcaaaatcacattaaattcaagttgttaaaacataaaatatatcaaaggaaaatgaaaaaagagagtttaatattaaaaaatatatggattaaagatgatttatacctaatataatcaaataaaatatttaaattatctgaaaatatttctacaaaacattcttttttttaaa

SEQ ID NO: 6166 - DNA, 848 bp, Glycine max
actctatgcttattttacgtgaagaatagacacactatctcaaaggatatttactgtttaaaataaacaaattgaaaggaaatctattgtcatttaatctttttgttaattacccgagaaataatatttatactatctattctagcaagtcctaacactcgtgaagtacaccattgcaatttcatttccattaccgctaagattttgcgacatctttctcaacctgtatatcttcttcttcttcttcttcttcttcttcttcttcatcatcatcatcatcatcatcatcatcatcatcatcatcatcatcatcatcatcatcatcatcatcatcatcatccgatgaaacgaccgttttgtgatggaaggtttcttgaattcttgtcactcccttttccacaggccctattgcttgatttattgttagtacaacatccttgacaacctgatttttgttgatatacaaaattaatgattctcattaagcatgatggataggatggggttaacagtgatatgataattaatacaccttatgtttttattatgaaatgaacttactcgttgaccaccttccacaacaatatcctggacgctctctgtgacactagttgttggagcctcaacttgagttattttctctttaagcacagctgatttctgtttgttcccttcatctatctccaaggctgcttctattgtttcctttgagacttttccatatgcaggaggaggaagaaaatgatatggtttttgcagaaaatacaaacacatgagcaacacctgcaatgggccatctgcattacatgggacatgaaagtagtcttgatgaaaaaggtattgaaaat

SEQ ID NO: 6167 - DNA, 850 bp, Glycine max
  misc_feature (826)..(826): n is a, c, g, or t
ccagcttgcatgcctgcagcagttaaaaaccaacaactaaatgaatcagcatgtgtaattaaactagtaatgaaggaactttgagaatggttattttgcaagccattcccaatataaataaaaagaaaaaggaaaaaacaaaacactcactccacatccagtatcaatggcagttcgaatggttccatctttcatttcagggatcagatcttgcattaaatcaacatatttaccaacaccattggggaacatagtacccccaccaggaaaaatgaatttctccccttcctttttcaaccaatgctgattggacttctgcttgttaatccactcatttggaacattgctgaaattagacataacagaaaacatgaacgattggcaaactatcaattaaagggaatttaaattaagcgaactttatcttgttaacttattatacataaattatacctgtaccagcattcatctctgctctttggccatctaattggaagcttatatccatccgggggaggaactaagcagtctttcctctccaattttggagggcaatggcgttccaacaaagtaagccgattggagatgtacttcttccatctctgaaaatttaagcatacttaatcaataaggaaacattcttctataagtcctataacattaaaaaagaaaaaaaaaaagagactattattagtaattttacccttggatctgtgcatggagtgtaatcttgaaagtcaatgctgcattcaggataactgatgtatttaatttgcagaggaattattgatgactccttgtgggattcaattgatttctcactgtnaattgacaaaaacctgtccttctc

SEQ ID NO: 6168 - DNA, 1154 bp, Glycine max
aatcttgggtaatttctcatttgagttgtgtgtataagatgtgtttccattttatttcattgagatgcctcctggctgaagcctgaagctaaatgcaatggcttcttctttgaggcataagggctttgcctttctgtgcaacatcaccatggagtcttttctggtgtaattgcatcttatttccctgtgataggaccaaaacgctgctttatttatgattttattttctagtgcaacattatttaaatgctgatgattgaaattaaactgcaaccatgtaatactttgtcaaagtaaattcttattacaaatcgatctccttccctctactttccttttcttcctcccaaaaaataaaccaatcttaatcacatatgatgctttctattgcaaacttaattttgtatccattttttttatttccagtaatcatatacttttctctttgctgtggtgttattgacattagtcaattagtgcaactttgttggtcttgtaatgtggcaatataggtcgtagactaagtaatgacaatatgttggtgtcttggtggcaatatcatttatgcatattcttgttacataaataaaaagttgttaggcagaaagatgcagtagtattatttggtgccatatggtgcttataggctatggtatcatagtagactggtacatgttatagacacatgatcagagagcatggacaaaatttgaattagtttctaaatttatggctagaatatcatggttgaaattgataacagcaattgatgatgaaggcataggcatgggggattgatttagtttaggaatatgtaccttgaataaaaacaaatgataaaagcccactacgaataaacttttcaataagtacttgtaggagaaataaggtaaataaacctcatttctctcataagccaaaaacaatttatgcagttcaactgttttaaaagctctctcatctaacttctccaaaagttgagacttgagatacatactttgattttaacttatgagagaaatttcattaatttcacctccttattttcttctcctatgagtacttgttaaaaattcatccaaacaggccaagggtttgaactttttgagggacttggcattgatcaaacaatgctaataatgatactatcatca

SEQ ID NO: 6169 - DNA, 865 bp, Glycine max
  misc_feature (805)..(805): n is a, c, g, or t
ataaaacacaaaaagtattaaaatagaatttttttgttgttgaagaaaacatgggtaaatgatggatagagagaaagagtaattagagaaaagcagagaagatggaggaaaactgaaaggaactgttggaaaggttccacatccacacatcaactgagaagttagtttttctttattttttttagtccatgagctgtggactaatcaccattcaaaatttaaaattttggcctattggaattgtggtgggcatgggatctcacagacaatccaagtcctttgtctgttaattaggcaaaaagatcccaacaaagtggtatttgtagatcataaccagaaatcttaagaccaaaatgaaccggtgaatattcaaaatatacagtaaacaagataggaggatcacagcagttcctttctgtctctatacaccaactgtcttgttaagtagccaaaggcaaagagccaattgaatgccaaaaatggagtgaagccaagttctgtcaagcatgaatccgaacactgtgattcctgctctattgttctccaagtatgtcactgcatcaaaagctagataactaaggacaaaacacaattggactaatactttgacaagaaaaataccactaaaaaaaatccccatttacctagagcctgcctcttatggaatgagatagtttgggtgtaaattggcagcaacaatttggtgttatctaagtcaatcctcctcatctcctacctcatcatcatccgaagatccccaactaatattggtagcaatagcttgggctgaaattgcatgtgcagntgttggtgtctcttcttcatgttgcaaacgagttatggtagcacatatgtgcacttacaa

SEQ ID NO: 6170 - DNA, 859 bp, Glycine max
attttttttctagtgagtatttccctttgttgacatcatgagatagaaagttataatctttgtaagaatggtaatataaaaaatgatgtgcatgtataatgaagtatttgaattgatcacttccttcattttccattcagcttttataacgtactcaataatttttctttcaaatcacaccaattgttatctttacttggaatcggttataaaagatcatccagaataattccagtctaatatttgttttgactctgagtcttttatatctatgattgtattaaatacttataaaaaatgaatacattggttcaaatttgagtgatatatatatatatatatatatataactcaaatttaattaagaactcatataatatgatataattaatagataacgatattttttaaatatgtgattaaatgtttgatgcttagtttgtatatatgaaaaatatatgttagaaaatattaattccttaaatagatttcaataccttgaagaaatatttgactttcaataaaaaatacccttgagttcagcaaaaaaaataataataatagttttacatatcactcatagatagaacattatgttgttaattaaaagtttaagtcacttataataatgttgactattttctaaatttacacctgatcaagtcctcaagcttatgtagctgtttcttagtaaaggtgttcaaaatcaattacaaactatttgtaaatcgttaaattgattcaaaaaattaaaaatgaattaaatcaaaaattacaaaaataaaatacctcaaaatcttttttttttttttttgcaaattgctttgattttaaaattttttttaaaaagatttccaga

SEQ ID NO: 6171 - DNA, 848 bp, Glycine max
ttggctgaagtctggaatttatcaatgtctttgttattttttgtttgaaatttaaaagtatcacatttgtatttgaatttttctttcagcatattcctattgggtcttgctccatttatcacatgattgtctgtaatatttatggttgctgtcaacccatactctgcgtgatttctacaatactatagacttataatttgtcttggaatgttgattttggcctaactcaatcccacaaaatcaacttttgaggtgagggttatcctttatttatatacactattttagccttatcactagttgatgtgtgacttgggtttttctcaatacaccccctcatgcctaacactattgggcttggtacgtgaataatatagcgggtggcccaataacagatctaggactgggtctgatatcgttttagaatgtgagtttgggtctaactcaatcctacaaaactgatttttgaggtgaggtttgtccccctcttatatacactattttggccttatcattagttgatgtgggacttgggttttcccaataacttttatttgtggatcacttgtttggtatcatagttcttttccagtgaaagtgattgggatatactttgaacgaggagtaatccttattccaagtactatgcttgaaatgccccaaaatatgtttaagcggctaccagccaattgacaatatattaacaagttttttaggagattaaaccaaaaagccaatgtgtccaaatttcttgcataaagtatgcatttaaatgctgcgtaacggatgttcaagcatctagagatttatttggttttaggacatctatagctgatttgatggtggga

SEQ ID NO: 6172 - DNA, 844 bp, Glycine max
ttctccttattcatttccttcgccattagcttcccatatgacggatccttcgtccacatcacatcctagtgaaccaagttctgattggctcattgctattaggaaaggtattcgatctactcaaaattctcgccctatttacaattttttgagttatcatcgcatttctccttcgttctttccttgtcttctattactattcctaaaaatgtttaagaggcacttgatcatcctggttggtgacaagccatgattgttgaaatgcaagctcttgagaatagtggcacatgggaattagttccttttccccctgtgaagaagatagttggctgcaaatgggctaatgctgttaaagtcgggcctaatggtgagtttgatcgacttaaggctcggttggttgccgaaggctacactcagattcatggccttgattactatgacaccttctctcctgtggacaggatcacaactatttagttcttcctagctatggctgatattcgtcattggcctctttatcaactagacataaaaaatgtctttcttcatggtgatttagaggagaaaatctatatggagcaacctcctggttttgttgctcagggggaatatggtttcgtgtgtaaattggtgtcgatctctctatgggctcaaacagtcaccacgtgccttggtttggggaaatttagccatattgttcagaattttggaatgaagcagatcactctgttttttattggcatacttcacccaggaagtgtgtttacctaattgtctatgttgatgacattgttattgcaaggaagatgctgccaaaattttccaccacgcacacttattcaat

SEQ ID NO: 6173 - DNA, 771 bp, Glycine max
ataagaagtctctctctctctctctctctctctctctctctctctctctctctctatctatctatctatctatctatatatatatatatatatatatatatatatatatatatatatatatatatatattgtgtccctatgtcctatgctctctattttagccgtatccccgtgtccgtgcttcataggtggcaagcacaagactaagccaaagaagagctccaacttccaaaatataactttccaaaaacactagggcttctctattaccaaatttccaagtttactaatcattggtcaagaaatagaggttttagtgaaagctgtcgttggaaggtcccacatcgtctacctcaattcttggtgtgcaacttatatatctgttggacaacttcacttaatactaattggttttaagatgaaatctaatatggtattaaagcctacaatctatcttggtaaatcgcctaatttcctattctagcaagcatctatggaagaggatgttggaacatcccacattgcctccctcaattcttgggatgcaacttatatatctattgagcaacttcacttaatgtcaattagtttaaagatgaaatctaacatctttgcatcttggcttgcacaatatctcttatttagttaggctaaaatatgttttaggcccctgataaattagtgaattttgttttgagtccctaataaaagaaaatatttttagtccttgatatttagtttcagtcctgggttaaataacgaattagaatt

SEQ ID NO: 6174 - DNA, 1301 bp, Glycine max
ccaaacttcgctgtcctgcagaatatctcagaatttgagtacactgctaatgtccagatggaattggagtaaaatgtggataacaaacactttaaatagaagttactgacatttgttgttccaaaaaagagagaaataattttggtgttgtttgcatatattcaaagaaccagttacttttcaaatgcaaatgtctcagaaacataaaatgtcctatgactctagcaggttcaccagtgagcctgtgcaaaatctggggtcatgttgcttcctgcaaagtgggaacctagactactactcatcctctgataacagtagccatgcaacctacccttctgtttgtactttcgaacaatattgcaccctggaatcttctacaaacaacaatttaccttccctaaattcttcatctactgtcagtttctcacctaacaatagcccagtctcaaagctgcaatcaaaatcaaacgtgttgagttcgcagaattcgcttgaaattgttaatgattcgctagaaaacgaatcttgtttgacacttaacgatgatgagctgaggcacaagataagagagcttgaaagtgctatgttgggacatgatacatatattctggatacttatgataccataattccagaagaatctgattcatttttgaaagaggcagaaaggtggaagagaatgatggaaatgatatctagaggggatttaaaagagatgctttgtacatgtgcaaaagcagtggcaggaaatgatatggagacaactgaatggttgatgtcagagttgcgtaaaatggtctccgtctccggcaatccaatccaacgattgggagcatacatgttggaggctcttgttgcaaggcttgcctcttcaggaagcacaatctacaaagtcttgaaatgtaaagagcctactggtagtgaactcctttcacacatgcatctactttatgaaatctgtccatatctcaaatttggttacatgtcagcaaatggagctattgctgaagtcatgaaggaggaaagtgaagtccacattattgattttcagattaaccagggaattcagtgggtaagcctaatccaagctgttgctggcagacctggagcaccccccaagattagaataacaggttttgatgactccacttcagcttatgccagggaaggaggccttgaaattgttggagcaaggttatcaaggcttgcacaatcatataatgtaccctttgagttccatgctatacgagctgctcccactgagggtgactcaaagatcttgcacttcaacctggtgagct

SEQ ID NO: 6175 - DNA, 847 bp, Glycine max
aggcaaaaatatacccctattgctttcaatcacctaaaccaatcaatcctctaacaggattcaaaacaaacgaaaaccccatgtgtatgctgtacgatgttatttgttcaaaacacaatcccaaggattaatacaccaatctgagaaagcaactcccccaaaacgctcccttctatacatccaccaattccaggacactaacttaatctgtgataaaaaatcaaaatcatctatatgcttctgattaaacacaatatgatttctattgatccacactgtccaacaagtagcatgccaaaataaatcttttgcccttttccttctagcacccaacagattctctctaatcatcccgaacagttggttgatatgatttggaatttgtaaatcgattcccacccatgtcataactctttcccacaatctgttaattaccgaacatagtaagaacaaatgattgctggtttccacctcaaggccacacattttgcatgaagacttgtagtcttgaataataactcccctcctctggagcgcttgtgctattggaagcctatcttggagtaatttccaagagaaagcaagtactttcgttgggacttttgcacgccagaatttggaaaacaagtttgcactctgctgaccctcttgttcagattgttgtagtccttctaaaagcttctatgccactgcggccactgtgaaagagttcgctggtccattaatccagatccaagtatctacattgctgtttggtcgaaaatcagcttattggaaaaaaacacaagttccacctagagatagtatcacgaaagaatatataagggggaacaaccctcatcttaaa

SEQ ID NO: 6176 - DNA, 846 bp, Glycine max
cctctagagtcgacctgcaggtggatgagttgcagaacacaatagaggaagagcagaagagcctagtcgaggagatgagaatggcaaccgaggagcttaagaatgggatggaggacacaaatgggggggcggaagcaatggcaattgactagtaactagattgaatatcagtcttcctgttgtaacatttctatcgtgtttttttttttttcctacagtgattaggaaccatatgtaaatgaaacatcagtattatgctagtgcttagaccttagtaaaactaatgcttttttcctataaaaaaaaaagggaactactaaatgcacttcgattggatttttctaccaattttgtctagccaatccttcaatatagttgtgttttgtccacttcatattttcttttttattgtattagtgtagcactatctaaaccatacaaactggggtatgacgatttttagaaacaagagtataattatagtaggtactactaatgaaatgttgaatttgtatttgtatgcttattagacaaatgttaggaatatactctttgtgcaggctggagtttgttaaaaaatacaattgtttttggattttactgtacttattaaaaagttttccttttgaatttgtaattttaaattaattttaatcaacaataaagaatgtattcaatagagtttatttgaaagagtattgttaacgtttttcaagtaattatacatgatatactacaacttcagtgacattacatttattatgggttggaattttttattccattaaaattaattttatagtaaagatatttttgatatacaagttgttattagagatgaaaatg

SEQ ID NO: 6177 - DNA, 817 bp, Glycine max
aacattacgctattgggacttagcaaattgccctcttcgaatatatttttaatctggctcatgtttacccgtgttatatatgtatattctcttcaaatatactttcgttttttccgtttttgtgtgggttgttagatggttagagatagtttcaaatgaaatatgaaccaaataaagagtagtgattgtttggagtatggctagtgttagataaaccatttttttttgcaccgtgtgtttattttcttgcttcttgtcaattgtgcttaatttgtgcatgtgttttgtcattcttgggctgactgttctcttacaacatttaaggttggagatgactgtagacaagatgttcttgcccttcaagtgatagcactacttagagatttatttgaagccattggattaaatctttatctatttccttatggtgtactgcctactggtcccgagagaggtataatagaggtgagtttattcccaataagttataacatcgtgaaaattttgtggctcacctgccaaagtattttcttgatcagaatgaagaatgccagtgcagtgataacttcctaattatggtagtacttggaagtgtatttttgctatgtatttcttttgagcaattggattctcagtctaggacatggaactgtcgtggttatcaaatttttcgtgttaagcacaagttttatgatcctaggacacaaacaagtttaatcacatgtgaagtcttttaatcaaacatatgagagagtttttacaaattagcttatgcataagctaattttagcttatgaaaaaggttactttagttttt

SEQ ID NO: 6178 - DNA, 834 bp, Glycine max
aagccagagatttatccaccagtggaaactcaagttataacaagaataatgatagtatctttgtagtttataatgttattcatttgtcaaattttgattttaaaatctaccaaattgaaagaaaaaaaaagctatttatttataacatttaagttgttataatttgaagttacttcacaagataaccaaattaccttaacgagggtaggttgaacagcagatgaacttaagctagattccttctgaaatctctcttcaaaacctgcaatgagaagcagcatcagcctgtcagaagttactcatagcaacggcattggcttagataagaaatctaactgttgtgaggcttgtcctaaatttacctgtcatagaagaagtgccaccacaaaccacagtattttccagcagctgtcgttgattatcagatgacacagttgaaatagcacggacaagctgatcaacaatgccatgagcctctaaacccagtagacatggctggaataaagcttccccaacagtatatctttctctcccaattgctatcacctataagataattcaacttttagatgaatgcataacttattgaattgaagatccatttatggaacttagaatataaaacacatcgttaacacttggggggaaggaaacaaagcttgatgagtttggtagttttatcccatcaaaccagcctgtttggctcagaaacgaaataatcttcaggctggtccagaatgttgaaagacaattctttgctagccctggtctaaaaaaaagcagctggtccattaaatagagagccagctcaaacgtccttatggagacatacta

SEQ ID NO: 6179 - DNA, 808 bp, Glycine max
actgatattaattatatgaccatcaaaaggccaaggataccaaatatgtacatatttctgagactaaattccagtgaagctctagaaagactgaaactagctcctgatgaaaggcatcacaaaacatagaattagacctacatctagagataattaggtgtacaagttttggaccaactaaaatcatttcccttgcaccaccatctctaagtgtgtttctgggtaagcattgacaaaatttattttcgttaaaattaactttgaaatgatgtgatttatgtttagatgtttttattcgaaaactcagtataaattttatccaatgcaaaaattacctgaagttacttcaattcaaaattaattttagactctaaatcaattccttaccatggaatcaaacatgtgaacatgtggctaaaatcaagataactgatattttaattgattctggatagtcgaacatgaaaccaaacatgcactaagttaatatcaaaaccctcacgccttaaaattttaagtcatccctgaattctaaaccaccaaatacaacagtttcatcaccaaaacactaaaagtaaactcaaaataaaaaacttgataaccccttcataaaaaaaatagcctgaattagctacgtacatcaggatatagacaaacaaaaaattgggaggggggggaggattgaacatataaaacagggaatacgcagtgaaacatcagattaagctgggaaaactaaaatatgcgcataaaagattagaaatttggaaaatgggttggttacctctgacgaaggagcatctctctc

SEQ ID NO: 6180 - DNA, 835 bp, Glycine max
ttcactaatagtccagcatcttctgcttgatgtgactcggtaggagtatcaacatcaacagacttgttatattcttcatttagtttgatattaatatagacttcatcttcttttatgtctttctgggcacctggtagtggatttgtatttctgcactctgtaccatttgacttgttcacaggcccatcatccacaatgtctgaagactctgaaatagctgggctttcaaaatgactggtagcagatttaggcaatgaagaatcactcacaatgagcctttccatgcattgagcatcaggactatcatgttcatttttacccatttcaccagcagcatcactcttactagtgctgtcactcttaaataagtcatctgattgcttgacttcagattgcaagatgtcattgggttgaagatctttcaatataatttcaatatcattttctaaattagatcctacaaccttgccatctgaagttacatcttttatttcagttatttttacctcatgatgacttgtgctgtttatgttaattgccctagttgtttcactagttgcacacccaaaggattcatccctctgactctcattagaagaggccattaaactaccttctggtaaacttatctgctgggaatttttacacgtgtcatcagatccatgctcttcagaaaagttaaccatatgaatttcatttgtctcagtttttgtagcattcctagaggcatcaatgtcatctgatctttgatggcattcaactgtgaccttggctggagaaacttcagtacactcttcggcatgcatttttttaggtgtaggctcactgttgactg

SEQ ID NO: 6181 - DNA, 851 bp, Glycine max
gccagcttgcatgcctgcagtgggtcaaatggtaaagtttctatgcttgttttgaccttgatttgtgtttcaataccatttcctggtcgtctaaatgagtgaccttgggattgatgttcatacattgtttcttatacttctccttctctggcttgccaattagatttcacaatccacttgcatgcctagttatttactctatattcagtgtcacagattgaggatgtgcaaagacaatgttatgggtgcaaaattgaaacaacttattatctattatttattactcttgatcttgatattattttgacaacttatattacatgattacttgcttagttgtattttagcttctatagttttttttttttgtttggtgttaattgtatctgttaataattttgcatcttggtggccacctatacctcaatactgttcaattgatgcctacccagccttttaagattttgctataattaggagtacatttagctgcttattcatcagaggcagtctgagatgtcatatgaattctgctggtgtagtgatgctaggaggactggcttacagatgaaacatagtttttagtctgttctaccactttccatagatattcccatatatgttgatctcctaattgtcttcatattgcttataaaatttccaatctatgcctgtaattcatttgttttctcactttatggattcagcctgtattgtcaagaacacaggcttctcttggtgagaacaatggtttgcatgtgggccgatctatggctatgtctatttccttctgagattatcaaatgagaaaattgagtttcacctatgaaatattgttcattttactcgat

SEQ ID NO: 6182 - DNA, 875 bp, Glycine max
agttggctcaaaaatttggaaaaaggatttgatattccatttcactcatgggcaagcaacataagagttgggttttgtaatcagggggggttgtcctataggttattgatggaaggatgtctttactaattctcacctatggagaattaattcttgcaataaagcttgaattaggtttccataggttttcaaatagtatggacacaatgtacatatatcagtaccacttgtactattcccttcatactaatataaattagttttgcttataaaaaaaaactagcttttgtggtgggattctcccaaggctctcatcaatttgaaaagagaaaactaaaaataattttaattctaatttgatgaatatgaaataaaggaaatcactcctatatatagactttatcacattaacttaggagcctcaagagactaaaaaaacactttacaattataaagagcctaagaatctgtacaggctaattaaagataaaaattaaattctattaattacaataattatactccacagcattaaggagaaaataattgagtatttgagtaagtttcttgagtggaaaacacactcaacctaacaatttatctagagaataattacatagaaaaataaaaacttcgtaccccattgcccagaggctcttcgctatgcgaaggtatgggggagggatattgtacgcaaccttacccttgcatatgcaaagaggctgtttccggattcgaacccatgaccaacaagtcttcaaggcacaactttaccgctgcaccagggctcgcccctcattacatagaaaatgaatacacaaaattaggctaatcattgtaactctatttcctaagttacaatgaatctaggcact

SEQ ID NO: 6183 - DNA, 881 bp, Glycine max
acctcgggttttctctagagtcgacctgcagattttacagtatcagaataagagaagaatgtttaaagaggcactttcagccacggttgcgaagtcatgtccctcccctatctatccttcttacaagtttcttctcctggttctatggtgtttcattttcatcccttttcttttatgaccagaatgcaccaaaaaaatgatgaccaagaaaccaaatacagaaaatgcacataaaaatagaaccatgaaggaactaggtatccctgtcccatctttaagaacactagccatctcctcagaatcatttgctgacttatgatttacctttgagtcaaaattttcactgaaattactgattttccaagaagttatgctttcctctgtcgcgtcctctttggattcgagtacggaaccatctttggggcagttccttttttcatgatgcagatgcaatgcttcatttagtgtcttcatgcattctatactgagaaggtttcgctgaaaattatcctcgtcattgtgatcaagtgttgaggagtctggtggttctggaaacttgacccagcatctgttgaccatgtcgatctctcgccactctgccttgtcaaaactccaattcccaacatggaattccaatccatagtggaaaactctatatttgatgcctggttcaggaacatatcctggatatatcataatctctctgtttatagtatgccttaatttcatctgcaacaacatttcaggttataacagtgaagctagttcataatttaaggaggatgtaaaataattatttttgtagtataacaatatagagtgcaactgaacacgtaaatgataaatgcacttcatgatgagggcatcaaattggatggtca

SEQ ID NO: 6184 - DNA, 831 bp, Glycine max
ctcctccactcctctgcataaacggcaagtagtatcttctaattcaatttgtcgccttctcagatttgctcgtgttggtagtctgtctctgagtagcctccatgcaaatgctaagattttatttggaactttgagtttccacaattcctcaaaagttccatcctggatatcatcttatatctccccctacaacacgtcataagcacttctggccgagtattggccgctattgtctgccatccacacccaccgatctgtagtatgtggctgaattctaatcccttcaacatcttttaggaatgagacaaccatatcaatttcactatcaaacaaaggtctcctccatctacttgatccaaaattgtcagatcatgataagattagtttatcttttggatagcatcttacttgaatatatacggtacacatgctgtaaatcattcacagaataatacagatttaacagtttcttatagcattttgctagatgatggcatttgcatgtgattgtatgacaaattagttcataattggtgcattttatgttctcgtgttcttgatatactcaactacacaagtatgatttgatttataacccttgagttttctctcaggatgagcatccaccaattccagatagcctttcacctgatattactgattttttgcttcaatgctttaagaaggtaaaccagatcttaactattggttgaaatatgtttcttatgcagatgttgttttaacttggatgctattggggttatgtctcacttttctttgtgcattcgttccttctttcttgctccctggttctgtccctacccacctcct

SEQ ID NO: 6185 - DNA, 824 bp, Glycine max
aaactcaaaatatcaacaagttaattagctattacaatcaatgaagcaaagaaaaagacgtttagatcaacttattaagcttccattctattctcactgtaatcctttcctcttctttttgtcagctgatgcacacacgcattacctattcaacattttttatggattagcagagctcgtaagaattacagtcatcaactcaaacttttcatgagccaaagagtaaacaatcaaaagcaatcatacatctggcactgtatttagtaatgacaacaaaatgtttattgttacagacacagtatcaacatctatttcaagtaatgacaacaaaatgtttcacgacaggatattgagtttgtaaggatatattatctttgctaaacatttgacttgttttctgttattacttttccactcgcttcctatttccccccctttttttatttatttaatattcaaacttttgtaggcccagaatctaatataaagaacttctgcatcatggcgcatattgaccatgtatcaaattagagctcttattactgtgagaaatgggatatagattatcttttttgaaattaaaattaaattaattaagatatattttaccctttttagtagttgtcaaattaattaagtatgatatagatcagtgcatttgagaagaaggactattgtgacgttcaaaataactgaaaatacatttaaggattatattgtaattgtcataaaacaaataactcaatggctaatcagtaaagatatttgatgattgattaataaaatattatatatcaaattactgtttaaatttttactaaatt

SEQ ID NO: 6186 - DNA, 885 bp, Glycine max
gccagacttgcatgcctgcagacactcaactaatggacacattgagaagcatggtgcagtcttttgagaatgatagtctaggaatcaatttgaagaaggatgatgaattgcttgtaaaagagaatatgataatgcattctcccacggggataaagaaacttgaaaccttttctgatataaggtcaccatttaaggagctcgacaattagttgcttgcaatagggaatagatttgctagaggaatgagatgtgcttctcttatatttttagcaaaaatgccattcagctttaagcatgaacatttctagattgtatgaaattcttttgttttattttgcgtattctttagtcgggtttcagtgcacttgttccataaattgcacctagttctttttttatataagccaatatttgtaccctcacgagtgatcttccataaattgcaccttctgctttttcttagaatttcacagtttgtaaaacatttttgcaatttttaaccttaaaataatgttttaaatttttacattaacttttaaatatactccttatttaaaattcctcaaataattcaattgctaaatgttgattaagtcagtaagaattacgtacaacttacagatattttttttataataaaaatatatgaactgtatctaataaaaatgaataatttgtatttcacaaataaaactttgtaaaaacaatattaaaaaaattaaaacattatactcattatacatgaattacataaaaatctactttttatataaatattagagtaagagtaggtctctcgttttctttattttctcataaaagactccatttaaatttttcaattttatctcaacaaaacaccaatgatatatgatagcgaaaaaa

SEQ ID NO: 6187 - DNA, 897 bp, Glycine max
gccagcttgcatgcctgcagcggtgaagccgtgtaaggagcatgctggagcaacgcttgaacttccctccgaagaaattattcggaagtcagcatagggacaagaggcaagcggttagaacaaagtctagatttttatttttgcttaggatcaataagcagtattgcctctgattttatgggggtgtttgattattatttttttgctcccaatcctttgtttcctttcaaatctatttagcggagtagacaggatataaatctgactggcaaaagtttatgatgccctttttttgttgtatgatcacataatgtatcccaagtttttttgtttaatttgccttcagcagaatttcaaattggtttggataagattgctgtgcctattgtttatattcacttcgatttctgtctttataaataacacactcacacatatcaacggggtcatggagtgtggatccttgtagtttcttatcactaagggttttttttttcccctctaggaccaaactgttatgaaaaaataatggctaccttaataagtagaaagtacagggattaaaatttaatgggtgaaaatatagggacttacaccttaaagatactgatacccaaatggacagtttgacatattccctccaatctcaaatataaggataaaaacacatttttcttggtctcaaatataagaaaatttcaattaactttatctcatttaatgttattatctctaaaataaccttcatttaattgagattttagttccaatgactcttttattccttatatcaagttccaatgaagaatatattgagaaaaaaataatttttattaagattgtgcattaaacatggttaactaactttcttagttaggtaacgagaatcattttttt

SEQ ID NO: 6188 - DNA, 867 bp, Glycine max
tctcatttcatcatcaaaacctctgcaacagaattttattcagtggggagtaaggtatgctacaaacagcaaaaatgatgttaacaaaaactaaggaataatgagtgttatcagaaaacttctattgacccgtaaatgtaattacagaaacaaaaaatcattccacagatcaaatccccactttggaataggaaaagattgctgtctcaaaagtgtgtatactatgaaacttacgttttagacaaatgaaatgttaagcattagaatttctacaaacaaaaactctcctatttctaggtaagaattatgttctaaataagttgaggcttaagcattttccatctatcacaaattcttattgttgttttcctgtcctttctggtatcttcctcttttccccctccatattctccacttccttttccttatgatttcagagtaaaccctaactaatttttcaactaaacttcaatgtacatagttctgatactataccctatgttttagaaagcctgtaacattaggacgataaaattataattgtcaaatccctcataagtcataactatagacgtcaagaagcagtgaaattattagaatttatcttattttccaatcacgacatatttatttgggtaagaggcacttaatgcctgtataaccaatattaagtaacaatgcaactttttgtgtccaaagaatgttaaacaatggttgaggttaatgcaaaaacatttctacacaagttaaatacatgtctacattgatttgctaatattaaaacttaaagcaaactagggggaaaggagacatagccataaggccccatttatgataacttaaaacttaacacaagatgtacaccga

SEQ ID NO: 6189 - DNA, 831 bp, Glycine max
agaataacatcaaatcaatcacattactagcatattcattattcactcaactaaaccaattgcatacgcatactgtgaacataaccaaatattcattatataataccccaaaacttaacaaaaaaaaataaagagttagttacctttgttgtagcgggactggatttcgttaattttttgttcaagaaccttgacggcttgtcgcagagcattccgcgattcttgggtcttcaagtatttcttcttccactgcgtatgagaaataagagaaagagaacacataaatgattaaaatcaaaaagtgaagtagaaaaggaaaatggaagtgagtgaaagagagaggttttttacgagttcacagcaggggtttgtggagtcagatttgggagtctgatctcgattcgttggcaatgccatgttgttcgcaatgcagtgaatgagtaacagattcgcttcacgagacggaagaagagtcagtgacgacggtaacagagtaaaccctaaaccccatagcaacagaacagaaggcagcgccacttcagtgttgaattcgaaacgaagggttgaattcacccaccatagtgtgatttttggtttacaattttatttatttttagttagatagtgtgttttttttttttttatcacaatattagttaattagcatgctagatgtgtcttttaggatttatttaactaaattgttgtgactgagtaaataaaatcactataatttatgatgatgaaattatattgaccgttcgatgattggggttattatattaattaagctttgtaagagttaaatatacaataacagtcaaaataata

SEQ ID NO: 6190 - DNA, 871 bp, Glycine max
gccagcttgcatgcctgcagatagcgcctctgctctgctctgttctgtcacaagttggccctgccaagcaaacaaaaaaaaagtgcaaaaatttaaggtatgaattgacaaagcgtagagtattacatagagacctcaatcaaccccaatcccccgaaaatttctcaaacaaaatcagacaattctggatagacagctcattttaaaaatgaactttttgactcataggatcagaacccaacaaatcaatgacatgaactaacaacaaagaggaacaaatatgtcatgagtattttactaaccttcatagatgccaaggaagcaatctcatgtgccccatttttagaagagtctggcaaacccctagcctgttccattctcaaattatctagaatcccacgaagctcttcattttgcttaagacaatccatcacctgaagagtcaaaggtcaacacaagtaacagtaagaattttagaagagaaatccagtaaatcgcggttgtacagatgagaccctaaacggttaaaccagtaaccataaattatatttagtcaaacctgtgatgctgattgttacctggttttcccatctcgctgctgctccaattgcctcttggtatgaatttgagagactagaattttcctcaaaaagcctctctatttctgtagattgtgagtcaatctgccaacaagatgacaaaccaaacactccatcagatgaaatatacacggcaaaggtgctttttttttttttgttaacaagagaatatacagagcaaaatttggatatagagagtttacctccattagaagtttctgcctactgcttttcaaacctctcatggctaaagccatatcatacaactgcct

SEQ ID NO: 6191 - DNA, 856 bp, Glycine max
tagacaaatctgatggtactgaagttggtcatacaattaaaaagttccctcttttaaagcctagagaatatgtgctagcttggaagttgtgggaggggagtgataaaacattttactgttttatgaaggtaatcaccaattattatggttttttgtataataaaatgtgaataattgtttttatctactgattagtgttaatgcacattgttatgatcctgatacttgtgaatcgtgattgcattaatatatgaatgttgttgcaactatatctctcccttactctgtctcttcaccttttttaccctatcatttaagaggaagaatctatgtaggagaaaatgatgataaagttcttagaaaatatagtgtcaagtagatagagattcagattataacttagaagacattattatttgcatgtaatactatccatgagtaattaactaattatcaatgttttaactgttttttttttttttttgcctacttggagatttatttgttgggatttgtacactatatgctgacatattttcacatcaaaatattctggtttctcattatatacatttaaatagaagctgttaaccattgcaaaacttggtttggtagaactttcgtatgccttgttgatattggcaaacagttcagcatgagtgatgcatccctattctccattcgtttcacctatctggctatctgttcataatcttcctgttgatatctttcagatggtatgtgcatatttagacaataggcaaaatcctatcttgaacttttcccttttgtcaatgatacttccaagggaaatacagggacaagcatattggaaatgacagaaatacatcttata

SEQ ID NO: 6192 - DNA, 805 bp, Glycine max
aaggggcctggagctacttcaattcctctagttgaggaaaagtgtgatgaaaggaaagaagcaaacatcttgacagcactggattatgtctttagaggtggagaacttctcaaacgtacaagaaaaggtatgtttactaacatgtttgtgatagtggcttcattgaaatggaaaagaataaaagaagaatgccaaatgtttaaagcaacttacattcctaatgccagtaaccatgctattttaattgttaataccaggagctcttcactggaagcaagtgtctttcaatataaattcaaatttgcaggtaattgctagaagacatttcatatatccattaacaaatcataggcatgagttccaataaattttaagttaattacaagggcatagctgaccagaaaattttactaattttggatacattgtcaatgtataggaatgaatgcagtagcagctttaaaattataattagaagtaacatagaaactaggtatcgccatcttactataatctcgtcatatcaatcaattatacatttgtttcaagtcaaagcatgtgttaactatagtattcataaagttaaaggcttcaatcagtcaatatttttctaataaagagtaaagactcctacaaatcttttctacataaaagtatgagctgagattcaaggcatcattttacatacttgtattgcatgttatatgtaaatttcttaatattatttaatgaaatattttttgttaagatggctgcccaagtagcctctctgctcaattggtaaggctgaattatctgatcctcc

SEQ ID NO: 6193 - DNA, 851 bp, Glycine max
aaggggcctggagctactgcaattcctctagctgaggaaaagtgtaatgaaagcaaagaagcaaacatcttgacagcactggactacgtctttagaggtggagaacttttcaaacgtacaagaaaaggtatgtttttactaacatgtttgcaataatggcttcatagaaatggaaaagagtaaaagaaaaatgctaaatgtttaaagcaatttgcattcctaacgtcagtaaccatgctattttaattgttaataccaggagatcttcactggaagcaagtgtctttcaatataaattcaaatttgcaggtaattgctagaagacacttcatatatccattaacaaatcatatgcatgagttccaataattttgaagttagttacgagggcatagggacaagaaaatttgactaaatttaaaaaaaaaaaatcaattttggatacattgtcaatgtattggaatgaatgcagtagcagctttaaaattaaatttgaaatagcatatagaaactaggtatggccatcttactataatctcatcatatcaatcaattatacatttgtttgatattgaagcatatgttaactatagtattcgtaaaattaaaggcatcaatcagtcaatatttttctaataaagactcgtaatttttttctacatcaaagtatgagctgagattcaaggcatcaatttagatacttgtattgcatgttatatgtaagtttcttaatactatttaatgaaatactttttgtaaagatggctgcccaaacagcctctctcaactcaattggtaaggctggttttaactgatcctccccaaattccacaatggtgggagcctcatga

SEQ ID NO: 6194 - DNA, 855 bp, Glycine max
cacgtctaaagttttgaatccaggggtgagacaacagagttttagcatcaggtctttgtctagcatcctgacatgtgcaacaaaatggcacataaaacaagttttagttgcgagtttgatttgatacaaatacaagtttggatcaatacaagtatccatcttgcctgtcctacaatggtagagatgtaaaactacatggagacaagaacgatagcatcacttcaatcttgagaacaaatatacaaacaaaaaatgtagtactacctctgttcctttttaattgttggatttttggagaatttttgtttctatttatctgccatttgcaaagttcaatatcacattaattactcctttatcaattatccccttatttgtctcctaatctttaattaatttatacatgcattcattgtggagtggaaagaaaaaggggcaaaatagaaaacccaacaactattttattatagtcaaatggccagcaattagaagaacagtcatctaagagcaggtttttgtatttaggatgggatagtaggtgctggacatttgtaatatgttattgtgagtctaggtcggttccttgtaacaaccagaggaaccagctgactacataatccttattatgtatctttagtaccactggtactcttcatatatataaaaaatatctatttttgctgagcaaaaaaaaaattattataatcaagaaaatttattgtatttcttggttttacaaaaaaaccttaaaagacaaataaaagggaacggagggagtaacatttatcaagctaaaaatagatattttaaaaggagatctccatttacactataaaacacatttcctatgctact

SEQ ID NO: 6195 - DNA, 851 bp, Glycine max
tgcatgcctgcagcagccatcaactcatcgaagtttgctgtcttccctagtactatttcaatctgaacataatttatcaaaagcagaacttagacaaaatcataaagcagaatccaaagcaatgggtaggaaggaaggagactgttaagctatagcataaaatcaacaaaagctgctgtttatttatttatttattttaaattaacttctttttaagttttaagagttgagtatgtgcacaaacacgtgcacgtgcacaaacacatcaaggacaaataggctccaagcaaacactctagagtaagtaaaaacttgtttcctgccttaccttggccttttgaacaggtcgacctctagagtcatcctttatgtcaacagttgatgtcctgatttctgcatgaggattccatcattaatcaaattagattattcaacaattgaaggaacagattgtgaacaagggagagggaccatttctcaggagagagaaaaacgaaaaaagaaagaaagaatagaatctcactcttttcaacagcaagtctgttgtttttcaaaatttcagcaacagttactactgtggcaatagctgtaacaatgcaataggggttgaaaattcagaaatcacattaaaattggaaccagggaaagagaaaagaaaaaggagaattagaaagtcacatataaaccataaatcgtgaaatacattgtattgtaataaagttctactattatcaggagacaatatgacagtcacatatcatgatatcaatggaattattgccctctaatttatcaatgcaatatgctttagccagactggttgcaacttgcaacttgcacttggcaacagt

SEQ ID NO: 6196 - DNA, 825 bp, Glycine max
aagctgcaaaagaggaggaagctgaagatgatgatgatatggatggttttcaaaccgatgatgaagatgaggatggcagtggttttgaaaaggaaatgggagttgatgctgatgatggagaggacaccgatactatcacacttagaaagttggccgaacaggtgtggatatgaagaccttaaaaacctttgcttgcatataaaggattattatattatgtctatatgcttgtatgacttctgctcaggtcattaaggtacttgacttcgtggtccaattttggttgaattatagttacttctataatttatattttattatgaagttaaattttaaattaaatgtagtgaacaaggaagaaggtttaaaattaaattaatttatttgtttgttaatattgaaacttgatgtattttaatttgaattgttttgttgaaatattttattgattaccattaccatctaggcatatcagtctcttggtacagctgctgccaatgcttagtggcagcattgcattggttttgaccccccataccacatctattgcttaaagctctgtccacctagtaaaaaagagggtctaggttaacactgggttcacgggctgatacagtcaaagaattggacaagtttcagcaacaaccagctaattggttgacttcttgtttgtttattggggctttactggtccagtaaactaggatgttcactggtttcagttgaactagatgttcaattctagttttcagaaatgggatcctattcattcaaattttgtgcatgttttggaaacaattgtttttagagaaataattgtttaat

SEQ ID NO: 6197 - DNA, 830 bp, Glycine max
aatttggagacacaaaataactatgctttcgtgagcttgtgaagatgaaggaggaagccatagaaatgtaaaaaggagatggctaccgaggaagaagataccagttttatgttttgacaatgaactgcaaaagaagtagctctagtccaaaaataaaaaataaaaaatagccctagtctaagacattttaggaaatttcagctgagagacaaaactaagttagaagaaaatgttagcataaaaaagcttagaagattaaactagaccataaaagttagaaaaacaaattgacacttaaattaaatttgaaataatttttttgtctaaaaataatgtagtggagactctattagatattcctttttatatgctttcttaacttaacaaatatcgtttattgtatttatttttctgaaagtaaagatttaacaaattaattaagagattagaaggaaaattaagtgcatcttttttttaaaaaaaaaaagtaaaaaagaatacaaaaatattttataagagataatcttatagagtaagatgactacattacatgtaaagttagattaattatgactagttgattaacccgtttggtgataaaaatcaaatgtatcttctaaaatgtttctaattgttaattgatttttatataatactgtaaattatttattttttcaatacaatttttctatccctgggtcttatttttaaatcacttattaacatttggcatttttaaaattgtttcttattattaaaaaaatgaccatatatgcatttaatcattaatcacaaataaaattttgggcagcatagatctgaatgagagc

SEQ ID NO: 6198 - DNA, 868 bp, Glycine max
ggcagcttgcatgcctgcaggattttttctgatgtgggtgcctagtcagtggcttagtgtttatttttggtggtgactttgttacctcgtactggagtgatctagtcctttatgtagtccagcactcctggtgcacttatattacttatatatgtatcatttgtttatccaaaaaaaaaaaaaatcaaacatgttaatcaactagcataaaattattctaacttgatcagaaaaaaaatatgcaacacctaatatacgatacaaataataaaactgttttattattcagcactctttttcatatttaatcacactagattttcctatactatttagatacaagactatttatatgcacgggtcccccactcccttcctaaatgttttctcctatgctcaaaattgaaagacttcttgccgagagaggcaaccttacaagcatatattagcttccaactaaaaaaatgatagcaaaaacaagtttattcttgtttgataaggagttatatttttattttgcattttcacaattttataaaaacgataagagcaaagaagatttcatacaacttttttttttttatcaataatcataaaaaaaaaaactatcaacttgggttgtttcttatgaaccggaagcttaccaaccttattcttataaactggaaggttatttccaagatttaaatatttgacattcaaatcatgagatggcaactttggatgtctgtagtttaacattagaacagacacacattctcatccatgtttatgagaagtaagaattcaaattttttttattcaataatcatttaaagttttcaaacgtaaaatcaaacacacatttaatccttgaatcaaagctcat

SEQ ID NO: 6199 - DNA, 865 bp, Glycine max
cgccagcttgctgcctgcagccctcaacttgttgccttatcctgttccctacaagtttgttccatttggagatggtaaaaccaatccattaaatacaaaacttctcaacaagatcacagctggggttagtaattagtcttttagaagtatctaattaaattatcattgctcatgtttgttctatgagcttattgctttgttctaacttattggattcaaattcaaaattccttgtaatatatgtaggagttcgatgctgttgtaggggacattacaattaccacaaaccgaactaagatagtggattttacacagccatacattgagtctgggctagttgttgtggcacctattaggaagatgaaatccagtgcttgggctttcttgaggccattcactccgatgatgtggtttgtcacgggaatgtttttcttggctgttggagttgttgtgtggatattagaacgtcgcttaaacgaagactttagaggcccatcaagaagacagtttgtgaccattatatggtaaattaagtgtcaaaacaaactataaaaaaacaccttatctgctataacattttttactgttttattatgagtctgaatagaaacttcaacaattgctaacatctaacttatttctctatgcaggtttagcttttcaaccctgttttttgcacatagtaagtggttgaaatttgacagttttccttagctagtgccttgtgtttttttgtgttttttttttttggctgctttactatatgacagtaagttttttaatatagacattgagaccatatccttcatatcttattatcatgatgtacataaaagaggtaccgattggtaaatagttaatttta

SEQ ID NO: 6200 - DNA, 863 bp, Glycine max
tgtttttcatccttgtgatggtgaaagaggtgggggtggtgcttttcttcaaccatgattgaatgcaaaagtgatctttaattaaagtggagagaaaatatggtggtaactatattaactgcttttatgttgatgacttgatgtggtttgtgtgtggagttaaactatttatagaatgcattgattattgtcaattgtcgtggttggaaaagtcttttaattggaaattcacacaagctaagaatgattaattcaatgcccaagctcaaagaatataaataaaaaaagtggagagaaatatttggattctgtcatgctattaaaagaaaagaaaaaaaattaataaactctacataaacaatggtcttcttaccataaaatatttttatgtctttctgcttggataatatgtctctcatattaagaaataacaattgatgataataatgataaaaaaaataaaaaataacacatcctgaaaatgatgggtattcgttttttttttttttgcactaaatacatttgtttactataacagaaaaaggttatgacaattatcacatagcttttaggtaagcatatactaactaacactaactagttgataatccacctgaataattacacaattcttcacctcggatcttcaatgcaaattacgtagttagatatgccatctgtctcagaaagagactcacttgtcacatgttccaacatttaccaaattcaggcaatgagtaaatttgggggtcctaatcagtcgattgaaaaatgactaactcccacgtttttagcgttaacataacttatccttttttacctctcaattgtgacaaatataactctttaatggtaatttaaga

SEQ ID NO: 6201 - DNA, 851 bp, Glycine max
ttgcagcctctgtgtacgtaaattcatgtagtagacaatttgaatattttgactgatttcacgtttattttgttcataattttcatgttttctcctttgtttggcatgtgtaattttttcctagtggtattcatacatatgaatttggggataattatcaatatgtatgtgccaatagctagctgcaaaaggattctgttcgtgtgaatatttgctaatgagttttgatgatcaaattatcttttatgcttaaaactttatatatgttgagtaagattttcagtttcttactctccgtttctttgttgtattgttgcaatacagttttgaaaacatccctgcggctatttcttgttcatattcattcaggcaaagatttgagaacaaggttagagaacctcttctcttaagctgtggttattaagaaaagtagaaaagaatccaaaacctagactgagattcgtgttcaatgatgctctattttctgtaatataaacttttttttattctttatatttttaatcaaggttccgcaggacagggcctagtaggagagattgattaacactcgagtggattcaaaaactagagaacaagattacccgtattagtagtaatgggaaaggacttggtttcttctgaccagactactgttcaaattcaggacaataatccaggatgcatgtggggaatgcttcaaattcttgattaccatcgttggcgcgtaaaaaagggtgttccctcacaaaggagaagacatgccacatgtaagcaatttgacacaaatcatgtttctctctcttcattattgcttaagttttggtttttctatttataaatgaaacattgca

SEQ ID NO: 6202 - DNA, 881 bp, Glycine max
aggctcataataatgctaatgaagacagggcctccaagattatgtggagaatgaaaattcccccaagagcgagtgctttttcttggagactattcaagaacaggcttcctactagggataatctcagaaggaggcaagtgacattgcattcatacagctgccctctatgtgagcatgaagaagaatcggtcaatcatcttatgttcaactgctccaagactaggagtctttggtgggagccaatgagatgggttaatagagtgggtcctctccccatagacccaaagaatcactttttgcaattctctcagtggaataggcaaacttgtacaatcaagagatgggaattcctgtggatagctctgtccttgtccatttggcatcacagaaatggcatggttttcaataaccagccttttaatcctgaaaaggtcatggatgatgccttattccacacttggtcctggcttaagtgtgtggagaagggcttccaactgcattttaatttctggtcaactaatttgaaggatgctttttcctagaggggctgggtttgtattgtattgtggcctgtctattgattcctcctagtggggtttagactgtatatgccttgtctttatcattgtattttcagtacacctagtactgaatttcatatataatatattgatatttgtcgtgcaaaaaaaaaaaatatgtcacatggagattagttaggaccataacagtcccagactacctaataatttctctaggagtagggggttctttaattggcaaaggaacatcatcaaccgagtgataggatctggctagttgcctggaaactataatttcagcccaaggcctgagtgggactgtacattgttcatgcttgg

SEQ ID NO: 6203 - DNA, 883 bp, Glycine max
ccagcttgcatgcctgcagcactttgtaggcagattttgttgaaaatattccattagtgtctggcttccaccaaaggaaatctctgctggactgttgaatgagagcagaatcaatctcagctaggaaatcagctgccacttgaatttcatgatcaaaaaagtcccttctccatgataacttccattcccacctaccttccacataatctcccatagaattgattggtgaattctgctgtttactgatcaaatataattggggatattttccttggagattgcaatttccctccatccatttatccttccagaatctgatactggacccccttcctaccctccatattaaattatcaataaagcagtccttgtgatgctgctgaaatatgctcttcaagtcctgccaccattgggaggtgaagttcctccttgtaccagaagtcaattccttccacccaccatacttagatattaggattctagcccacggttggtcatgattattagccagatgccacccccatttgccaagtaaagcttcattaaatagagataggtctttaatccctagaccccctttgttcttaggaagacaaactttgctccacttcacccaaggaattttgttggcctcttggtgacctccccacagaaaatttctctgtatggagacaattttttgaaccacttttttggggatcctaaagaaggatagaaggtaaataggtaaggctgagaggacagagttgataagggtgattctgccccccatagacagagttctttgctttcatgttgcaagtttaacttcaaacttcgttacaatgggctgccacacgatccagctcttaagggataccccaactggatttccaaggtaaat

SEQ ID NO: 6204 - DNA, 852 bp, Glycine max
atgctcttttccccaccggccatgggaaactaactccttctaaactccaggcaagcaaatcatcatgctttccactatagtctagcagttgtttatatcatacctgtagaaatttagctgaaaaattgtgaagtagatatgaataccaaaaaagttgttttggtgtactgtttatgttgtgttttgattgatttgaacccttgtgtagaatgctatttttataaatttctagaactttaacatagggatttatttcattctttttttcagtctatgtgggaagattgcaaaactgggttaaagtgggttaaggtgacaaactgctactttcctgatgatttgcctgggaatattggtcatccgtgtatatctgaagtcaacgaggtattttttatacatacagatttatatataaaattataaatagatgtgtcttttttattagatggatataaatgcattcatgcaagtgtggaagtttgtcattggtatgttaactatcagtttttatctaaagctagattggtttacatacacttatactccataaactgtttattggtttgaacttgtaacctatgcagtcaatttctattttgattgatattccaatcaaatgattatgctcctcatcttggacatgatcactgttcagaaccttatattgcgtatggacattttttctttgttgaaggtttatgaatctaatagtgatagaactgaaatggctagctctattcgagggccatgtgaaagtcctcccatctgataaatttaaacaagagaatgacaggcgatgtcagttacgaaatgaggaaaagtctagagtgcagcccattttctatgcaggtt

SEQ ID NO: 6205 - DNA, 854 bp, Glycine max
gacttgcatgccctgcagagtagttatagatgtaactgatttgtttataaataagctaaatttgtgattgaatactcactttgtgcaggcctttgcatatgaggttgtcatactcaatttgcaagctttccttgtttcatactagattggtctgctaatcttctagcttttactattattgcttatcactgagcaaggggtggcaaaggtgtatttgttcttaattttctgatcaagcacaacacaaagagatttcacatttcacttatcaagttctatgatccatggtgatctataattatgatggggatgggttatgattataaatttgtaaactagaaataaaagaggaagtaatagcattgataatttgtgttagagtatgcatatattagccaatagctaggtgacagtgaagctcttttacagccgtcaagtaactctattctgttatgcttagttgtattctgttatggtaggtatcactagctgtatagtcttttactgattgataggttctgttatgataggtggttatgccaggaattgagaattctgatatcggattgatgaatatagggaaagaggtgtgagtgagagagaggagggaaacctctggtttaggagttgtaactctggggggaagtgtactcttggttgggttcaatttctgataattgaatgatacacctcattttgcattcatctcttacctggttctgtgactctggtttgggttcgatcagactagcacgtaaacgctgttatcacttgctacttgctaataatggaaaagtaaaggactagaaacctcataatttaacatgtcattcattaagacacattagtttcaa

SEQ ID NO: 6206 - DNA, 868 bp, Glycine max
atatgcaacagcatgatgaggtcgagctctcagctctaggaatgggtattgaaatccctctcgccttttttcctcttttattccttgaatttcgcttgtgttggttctattggttgcttattgattagtaacgtggactcgttcttttcgttcattcaggtattattctagttatagccttataggcttgctacatataactttatgtgaaaaactcacagaatgataacagttcaatgatctaaccttcgttggactaaagatgttactctgttcttctgactaaactttctatactgtgatactggtgagtggtgatactggcaaccatcaatatgcactcatgctcagttttaacgcttaattttaccggcctccccttctccaatcccttgcgtagcataggtttgtttgctgtgctgacccatggtatcctttagctagggcctaggctggtaacaacttaagtttggaaaatctgactatgacaaattggatgaactaatttttaaaatagctgtattttggaggtcatgtaattagagttttgccttcgattggtggttaccctgaagatctacccacaatagctattctttaagtttgggcttgaagtatgatccaacacatagttattgaagtggcatgtagtggtcagctttgaaaatgctactgtggatataaatataaatataaatataaataatattataatacaaactaaagaatttataattttatgcaacacatttaaatactaaaaaacagtaaagaaattcacgataaataataagtcagagtttacacatgcaatcaacatcaatttaggagccattagaacatagtaatgaagttaaaggggaaggag

SEQ ID NO: 6207 - DNA, 880 bp, Glycine max
ccagcttgcatgcctgcagcatcagaagttgtgttctgactctcagccacagccactaagatatttgaatcatgcaatgctcctgaaccttcattattatctctgcttcttggagattcattttctccgtgcgtggaaggggcggtactgcaagcccaactaccagcaacttcagaagttaagaggtccgctgttctgattaagcctccagcttctgtatcctcaatggtcttttgagtgtctgaaggattatttgattgtgagtgatgtaaaccttcacgagaagttttttgagcatggtcctcggtttcttgtacgttgttatcatcatcatcaatttgcattgtgtccccatctaaacacttgttcaaatcaatattctgttcaccctgatttacaggactttcagtttcaagaactcgctcagtgcctacagcagcatctccctccaccatagttgctgtgtcgacaccatcaatatcagaaccaaagccgcctctaacactatggtcatgatcagcactggtgaattctccctcttgtgtattttgacattcttcacttcttatatcacagtcatgcttctcagtgacacttgcttcattgctcgacgtttcaacatgaactacgttgagcctttgtgcagaagtagttgaccctgccttggcacaattttggccatggaatccatcaacttctttttctctgccagaggttccaacaatgactccatccatttctacagaagtattctcataattttcatcatcttctagagttctctgcatagacttcaattgttcctgttgcttagcaaacaatatttgtatctcttcagtaggggaataaaatgctcgaagctgggtttccctgcatgaca

SEQ ID NO: 6208 - DNA, 894 bp, Glycine max
agagtaagggacccttgaaaagctttgtataacccaaaactgatgccttcatcaatactcatggactatactctcaacccaaaaataatgaccgaaaaaggatgtaaaaaaaacaaaaaattttatatcatccctcaccaaaaattaccaataaagcaattggcgaccctacatacccgtctatgtgacaggcaacaaatattacagaaatcgtatccatgaaacaaaaatacgttggcacatacatggagactataaaaggagcccacaaaagggaaaggggtggaaggcgacaacacagtctttgcaagaatgggcactttcctccaaaaggatagccccaaagcaccaaacaataagctgaactaagacctggagaaactgctgactccacagttccctgaatacatcatcctctctctctctctctgggcaatatggctacttcggtgcacagtgctccaggcacttcaatactgcaaactcttcatgatcaaagaccaacaactggtgaccagaaagccgacaaatgcctcaaatataggcaaccctctgattttcctaaagaatgggtaactgagaacttgagaattaaaaaagcaacagtaataatgtacattcagaagcttaagaagctgtggcagccgttgacttctctattttttccttttcaatttctgcccttctctgctcagcatgctgggcaacaccattagcgagagcttgataattaaactcaagggtttgggtaaggttcacaaacctcgatggatccgatgattgtatcactacaggaaaaaattaaattggtaaggggagggcatgtcagatgatacaaagaaccatatgatggcaatggttaaccttgacatttttagcttacctttgatggat

SEQ ID NO: 6209 - DNA, 888 bp, Glycine max
tgagtcttgcttccccggcacgctttgaactattcatctttgatgaaacaaggcaacgagttgtaccagtgtttgcgggaaaaggaacactctttctccatgttcaagttttatgttcaccgttcactgtttgaaaattagttttttcttttttttctctataggccaaaacctgtaaccaacaacaactcaagaaggatatataaaggagactagttttcacctatgtgcatgcgtttccattgatgtgttgacgattgataagaaaaaccaaattaaatgaggaattcattccctgtgtctgtggaaaatgctgaccttttcttctctggtctcagttgaagccaagacaactcttgcaaatccaaaagttgaaaatgatcttttggaaatgagacattactagtatgagtaaatagtcaaattggtccttgaaaaataatcaaattggtccttgaaaaagtgagacattaacaaattaattcataagaaatgaaaaatttaaatttagtctatgaatatgtaaaaagtgcaacaatttaatattattcatctttcatggacaaaatggtttcacaaatttaagaacaagactaatttatttcactttttagattttacacattttggattaaatttatatttttcatctttcaagaatcaatgtgttactgcatcacacttttaaaaacgaatttgactattaaatcctaatggtgttcttaagaaagacagaaaaattagtgttttagatgaaagtatcatagaaaaattatccctctaccttttattagtggcacgtctctttttgcgtccaacataaacttttacccattattctacagtatcgctacatagtcaagaaccaaatcttcctaactggttttt

SEQ ID NO: 6210 - DNA, 852 bp, Glycine max
taaggaattacaacaaaaggtaaaattattttacctatatatacaaatattttttagactttatactttttattaaaatgcctcaagtgcaaaattatttctcaaacatgccacattataaagttgtagagaaattggttttagaagaattggcttcccaatacatacataatataaatttgtgttgggaagtcgattttaaatgaattaactttccaacacattttacctttttttttagatgacgttgagaaattagtttttccaaaacaggcttttcattgtgttctttttcttttctttccatttgatgtttttaggaaagttacataaaaaagaagaaaaaaaattaaaagttaattttgagaaaatcaacttatcaaaatggtttagaagaaagaaaaacaaatgtattacaaagtcaaattcctcaaaatcgactttttaatgccttcgatcaaatcaaatcatatcttacaggagatattttaaaaacataataatggtgtaaaaaaaaatcactcgaagatcccaatgaatttccggtccaaaataccactataccaggtccaagtagtttggtctagatcaaatcataataataacttcctggtgtatgtattgaagaaactagacaggaaaaaaccattttatgaaatcctttacaatatgttagtgacattaagtaagagtaatgatatatccacatctgtatagtatatacacatctactttatatccttttttttaatctcctttaatttatggcactatattacctccgtgtctacacatttcgtatctagtaatagtacattggtatccatgcatcaaataattttatggattttt

SEQ ID NO: 6211 - DNA, 810 bp, Glycine max
  misc_feature (653)..(653): n is a, c, g, or t
tgatgattggatcttttggacttctgatagttgtgcacaccattactttactgctgctataagatgtgcgagatagggagtgaatagggtgtgggaccagagattctgattaagtctaaagtagcttttaagacattattataccttgtattaagaaactttaagacatgattataccttgtattaagatgctcttacattttctttcagattgttgctgccactttttgttctttggatttggagcataattgattaccacatttgttttaatacctcaatttcctcactcaccatatgtcactttctgtgttcatggtacattttggggtccccaacacctattaattcatcatgtgtccatccagcttagcctagttgaccaatgcatgctgcaacaaagccacatggtggtgggggagcaatgagctagaggttgcagagtttctactgcaccactaggtctctgacagaaattaattgttgctccaatctatatagtttactaagagtgttttatatatctaagctattattagtgagaatatttagtaatttctattagagctagttgtgtatcctctcccgtcttgaaaatctccaataggagagatatacacacaaagagcaattgagtgttttaacttctttgngtatctcttatttaaaattttcacacaagaatgaatacacactcggcagttataatttactaatgaatgatataatttcaacttttaatagtaaaaatatttttttattttaaattatttttattaacgtcacctaaataagttagttaccaatttt

SEQ ID NO: 6212 - DNA, 856 bp, Glycine max
agaaaaagatgaacgccacctacattatcagtattgcaagaaagcttggatgttctatattcctgcttcctgaagacatcactgaggtagtttggaatcaatactaatattgcgcttttctttgttaaaaaaaaattattattattattatttaaaactgctgaaacattcagttgtggtttgaaccttcaacctaatacacgcgcactttttagggaatttcttcaaaaatagtcaaatagcatattagtccatgtcatttctaactagatttgacttttttttctcatttgagtttgattttgatgcactgttagtgtaaacatttttttatactatatcaaccaattaaaagcatcctagatatgagttttaaaataattattttaaaaatcaatattttgtaattacttttcaaatgcctataatgcttgtttacgttattatcccatcataaattgtcatatatgataaaatggttttttctttttataataattactttaaaattctttccattgacattatatcaaattttaactcttatttatatggcaattcatgattggataatagtataaaaaaccttaaaaaaaacatttacattgttaatgcattccaattaagttctttttgtgtgcagtgcttactttatgacaatgctgttacacaatttcaggtgaatccaaaaatgatccttacactaacagctagtataatgtcttggtgcctaaaacaccctcatgaagaaaggacagtgggaacttccgataacgagagtgggggtcaattggagactacatcaaactcacactagatgactctgcctctgattcatcactagatgagaatggga

SEQ ID NO: 6213 - DNA, 861 bp, Glycine max
atgatcccaccctagcagcaggtcttgttagaatgcacttccatgactgtttcatagaggttcattctctctctctctctcttaattatacaaacaatatctcactcacacttgccagaaattattacatggtccaaaagtatcataatctcagacaatctttgtgtgatacgtaactgagttttattaaatcttttatataaaatgtaaaacttgattaagtgtgttaagtggagattagttggaactatatagacatataatggtcttcattctgaaacatgtaataaatttctccatacttttacacagatatggatgaaaaagcatggtgaaaaaatgttagaggtttaatataaaaattaacatttgtatcgtcatgctgataaaaaaaaaatagtttgtgtcttcgcctagtttaaattaacttatgaaatgttgattcatgacacaatattagagtctatgcgacttagtgatctttaagttgatccttatctactccattttcctaataaaaaattgaatttctttagcatagggaagtggatgggctcgtgtattgtctatacttcaagttagaagtgcatgttaaagatgtaatataaatcattcacgtgtttctatatacaaggttttaataaatgttaatattgttgcttcatgacaaagaaaaaaggagtggagagaaatatgattgaagtaaacatacaaaaacctaagatacttaaatagcacacatgtagaaaaggcagacatgactgtatttacgtactttgaagatgccatgtctgtctttcagggcaaacttactaacttgcatccattttctaaacttataaactgcacattatttactta

SEQ ID NO: 6214 - DNA, 809 bp, Glycine max
  misc_feature (735)..(735): n is a, c, g, or t
ttacgccagacttgcatgcctgcagagtcgctgtatgtttgcacttgtattttcttttttttctgtaaaaaaacagagaaaatggagcaaacattttttgagagaaaaaattattccaactctctctttctctctcttgatagtaaaaaatattttcaatcccttttgcgttctccccttccagctcatctaatggagcaactatggtccacaagttgtatttggtctcttgtattttctggggtctgaataatggggagtattgtttcatatctgtttgttacttaaaatcctatccgattgtttctttgacatgcagtttttgaacaagttaccaagaatgcagtgcgtggactttgggcacggcgttcaaagcttaacctggtcggtgctcatattaatgtttttacaggtgaatggacacaaaaggtacaaagtatatattatttgttgaaaatatacatatacacatacatgtacatacatacacacatgtgtgtgtgtgtgtgtgtgtgtgatgctctactttctgtaccaattacagtgcctctttttcgtacttgtgttttatctaaaagtgtactaccttgtaaaacacttatacatccccttttcctctggtctaaataaatgtacagggatcctaatcctaaccaaagctatgttagcaatttcagttgtttacagtttattttgcattcattgccccattgatctttctcttctttaatatgngtaactttacaattaggacatagattcttccaatttttgtgaatcaacagctactacagctatctctttggcta

SEQ ID NO: 6215 - DNA, 856 bp, Glycine max
ctgtttttcaggtatttatcctagctcctatgtccttccctgccttgttggtgagaatctaaaggtgttttgaattattaatatgcttcttgaacatataatgcgagttagtggatgaataatttgtacattattattttaccatgtttgcttttgattataccagaaaccttttgtatgatttgttgtttaatttaaattaggcttgaatctttaaattgaaacttgaaacttaaatgtatacatccaggctgaaggaatcttcagaattaatgctgaaaatggtcaagaggagtttgtgagggaacaattaaacagaggcatagtaccagatggcattgatgtgcactgcttagcaggtctcataaaggtattactatttttttccttttcaaaatcactctcccttttttttctccctatataatttgagatttatttggtcttggattgttggattttggtctggtctcttatttgaaagttttctaggtgaatttaataaatacactaatgttaattgttttcctttttttaaccatggggttgagtggtggatgcattaaagaggccactaaggcactaactcattatggcaactatattaaagagattatttcattaattttgatgtgtttgtgttccttcataggcttggtttagagaactaccaactggggtattggaccctctttcgccagagcaggtgatgcaatcccagtcagaacaagaatgtgctcagcttgtgaggcttcttcctccaacagaagctgctttgctagattgggcaataaacttaatggcagatgttgctcaaatggaaaacttgaacaagatgaatgcacgtatattgcaa

SEQ ID NO: 6216 - DNA, 878 bp, Glycine max
gcttgcatgcctgcagaagcaaccttgcgatcaatctgcgtcatttggccaattttttcctctaaagtcattctgttcataagatccttgattcgattattgagtggctgttttggatctttatatttcaagtactctgcccctgtcatggctgcccaacaatgcaagagcataatccccaccgaaaagatgggaattttggccatttcttattctcctcaacgcaacttcaaaatgagagatcagaacaaggttcaggtctgcgataatgatgactcatgcagcatacaaatacaaatgacaaaaacaaacaatactaacaacgtactaacagaaaaaaaaaaaaaaaaaatataaccaatcgtcaaccacatcagaaaacacaaacagaacagaatccgaatgctttggaaagttctagacataaacgaaaaaaaaaaaaaccaatcatgctatttaacaggaaaaaagaaacaaaaaaactggatcggcatgcaacagaaaagtgaaaaagtgaaaagaaaggaacgatacaatagacactactagaacaaggttcgttctagtagtacccagaaggaatgactagctcacctgcgtaagcgtaactgagacgagagagagatagagtaagagaatgcgtactgcttagtgggtcaatgaatatatagaaagagagagacagagcggaaaagaaaaacaaaaatactatacaggcgaggcgtttacgttacggtgttaatacattagcaaaactgtttgtatttaaaactgtaattcaacatgtaattttagtttaatggtcaaattaaatattttaattttttttaaagggaaatattttaaatttgattcattagcaaactgattaattagtc

SEQ ID NO: 6217 - DNA, 864 bp, Glycine max
agtcaagtcctctgaagagtatcttgttcaggataagtgctacactaatgttgaacattcgaagcaggattctagacctggtgatttaggggcagatgatgatattcttgcatctgaagggaaagctacaggagaacacaatacatctagtatggatttatgggttactgaaactagtttagaaagcaaaggaaaattaattgaaaaatcatctggtacatcatctgctggcattcctgaaagcaccattcaagaagtccgagatagtgactctagcaaactggtaaaggaaaagaaggttgttgtgagagtggatgcagttggtaatgttgatgttaaggtcaatgttgttgcaagcgaaagtgaaacagaggcaattgaaaatttttcgtgcacctgtgaagtagttgatgtcaagtgtgataaccgtgcttctgaaggactaagcggtgacaaagagacagctggcaagtctcctgccattcgcatgtcgtctgactatgtaatagcaacagatgagaatgcaccccaatcatctggtgacattgttgataaggttcttgaacacgtaaatgaaagggaatctgaaaaaaatgatgatatggttgctcaggatcatgctaaggagtccataaagcaaaaaaatgagtctgaaaatgatgctattatggtgcccaagaacagaggtttatgttcaggtgcgactggtcttgatgctgaatacgtggaagagaattcaggtacaaaagaggtttgtgaccaagttgcaggagcaggacagatagtgcacacagatttacctagctttccttcacgaggaatggatcagtgttcaggtcataaggattcaaaattgactgccat

SEQ ID NO: 6218 - DNA, 877 bp, Glycine max
ttcggcagcttgcatgcctgcagaaatttgagatgcctaagctaaatcagtcactcaatcattagttctgatccctttagaaactgtacatttcaaaaacagtagaaaaaaaggcccaaacctgttaaacccagttgccatcattccaattgggcttggaagaaggtcctccgtgctcactccgacttcctgtaaatctatgcaaggacagcttgtttcggactgttcttaagggacctgatctattcccatgcttaatcggtaaagatatttcatcgccaatcaagcttgaagttgaaaacggtctgttctccatttcttcaagtggaccggaactgtattccatagtgatgaaggaagaagcttgcccataagttaatcgaggggttagccctcccgcattccaccaactgctatctgaaggggcaaggtcacctctaaaatcagactcctgagcagaggaatccttctgactacaataatctccacaagtctcatctgtatccttgtatattaacttgagagcctgcacaacttcacccataaaaggtctctgtgtaacctccgggtgaacgcacattgaagcgatagcagcaacctttgccatgtcatcaaagttgtaacttccagccaaagatggatccaccaactgttctacaccttctctactcgtcaacattggccgtgcccaagttacaagattctcctgtccctgaggttgagacatatccactggctttctgcctgtgagaagttcaagcagcacaacaccataactataaacatcacttttgacaagtaaatggcctgtcatcgcatattctggggcaacatacctgcaaattaaagatcagagaaaagcatcaaattaaaacct

SEQ ID NO: 6219 - DNA, 847 bp, Glycine max
gccagcttgcatgcctgcagatgttgtactctaagtcacaacaggagcaaggaagtcttgtaatggagcttaaatatgggcttcagttgttgaaggatttgcagtttccgaaacagggtgtttttaaggaagaaatgcaagagaatgtggaagaaaacaggatcctgaatgaacttactttctcttccactaggtcgttattaagaaggcagcaaacggaaatctctaaattaaaggagatcaaagagaaactggaacgggagtttgttgtaaactctgaagaaaacaatgccctccagcaggaagctcatcaaataaagaatgatatccagctcttgaataataaatatcatgctatgctggaacaactacagactttaggtttggatcctaaatgttttgcagcatctgtgaaagatttgcaaaatgagaactcaaatctaaaggaggtctgcaagatggaacgtaatgagaaagaagctcttcgtgaaaagtcaaaggatatggatgaacttttgattgagaatgaatttatggaattttccctctcaagattaaatgatgaattggatggattaagagcaacagtgaggaaatttcaagagtcttgccatgttctccaggaagaaaaatctatggccgttgatgagaaatcagctctactttcacagttacaaatagtcactgaaagtatgcagatgctattggagaagaatgccttgttgggagaagtccctctctgattcgaagattgagctggaagatttgaaggctaaatcaactgacttggaagaattctgcaagttgctaaatgatgagaagtacaatctcctaaacgaaagaagca

SEQ ID NO: 6220 - DNA, 881 bp, Glycine max
gacaatccctaccaaaagtttctattcgactcaatcttcattgttgtgtaagacatgcttttctccacatttcagtcagcgtgtagggttaacttctcttttcctttaaaaatacaggcgagaaattagggaatagaaaaattgcgtgaaatatattccatgtaatttgaccccaatttggagggcacaccaaacttttaaccattacagagagcgaggaagatagatgccacaaactccagttcaaccgataggatgttctccctattttttcccccatgttcagtattttctctagaaaaaatgtacataatttattgccaattgccaaacaagcaacactttatggataacaaaataaataatgtacatacattattataattaatatatgtaaaacaaaaatgaaaagaatcaagaaaatagacgacaagatttagcaaacaggtgaaaaatgcaagcccaatcacagttttacatgctaccagtttggtcaggagtaggttttggtttcacttttgccatattaacaaggtccccaaataacttatcttctggcttggaaggcttccccggtggcacataggatggagaagaaacctggtaagaatttttcggagcaccgtcatctctcacagataaaccatacatttgctgctcaagatattgaactcctggttgctgaccatagccatatcctccgaattggttgccatgcatctgttgaggatacatggaagccacgggactattatgcatttgatgtgaaaaccatgcccatatagggaccagcagcaccctgaatatgctgtcggtacaagcctaattgattgctttggacatggttattgatcgttgacatatggccagcatgtggctgc

SEQ ID NO: 6221 - DNA, 810 bp, Glycine max
acaatccctactaaaaaatttctattcgactcaatattcattgttgtgcaaggcatgcttttctccacatttcggtcagcatgtagggttaactcctcttttcctttaaaaatgcaggcgagaaattagggaatagaaatattgcgtgaaatatatttcacgtaatttcacccctaattttgagggagcacaaacttcagttcaacccataggatgttctctctatttttctccctatgttcagtattttctctagaaaaatgtacataatttattgccaattgccaaacaagcaacactatatggagcaataacaataaataatgtacatatattattatattttaatatatgtaaaactaaaatgaaaagaatgaagaaaaaaaaggaaaagatttagcaaacaggtgaaaaatgcaaacccaatcacagttttacatgctaccagttggatcaggagtaaattttggtttcacttttgccatgttaacaaggtccccaaataactcatcttctggcttggaaggcttccccggtggcacataggatgtagaagaaacctggttagaatttctcagagcaccatcatctctgacagataaaccatacatttgctgctcaacatactgaacccttggttgctgaccatagccatatcctccgaattggttgccatacatctgttgaggatacatggaagccacaggactattatgcatttgatgtgaaaccatatccatataggaaccagcaacaccctgaatattttgcgggtacaagcctaattgattgctttgaacatggttattg

SEQ ID NO: 6222 - DNA, 831 bp, Glycine max
tgaatggtatgtcctcccacaatcaatatttagcctttatcaccaacagaaacatatctaaactctccaccccaccctaggaaataaataataaataaatgacagctgtcatcgaaccaaagattctccaaaatagcatgattttccctacaattgcaagtcttaacattttccgttgagacttatatattctgaagtaaaaaataagtttaaaactaggattagcagctaagaaactgttgaaaaaaagtcaaaagttgcttctagatcaggtgaaccaggatcacacacttaatggaatttggagatgaacaatacaggatccagagagatttgagggaaacaagtattagagagagatgatccctgagaaaaacagaatattctcatgacagacaagcaagtgtcgtatgatatgttttcacatttatttttctttctttgcaataagaggtaaggattttgttcaaaatattatggtataaagcaggtagacaaaagaccattttcagcaggctccaaaccaaaaaaggagccacgataacagtttaattaaaagcagaacattgcataactggcataaagcattgtaaaattgtaaattaatagatacttatagaacatgtcttgtcagctacctgaggtgttccaacactggttgctgccatggcctccgcacaggtggtactagctgcaagttgatgcaagacacgcaaacaactcaggcgcacacgttcttgaggagtttggtgtgttctctgctgattccttatctgggtcatatggtttgttctgcatgtctcccattgtttacctcacctgatgacattg

SEQ ID NO: 6223 - DNA, 708 bp, Glycine max
aattagattttttaactgaggcaaagaacagtgagaggtgtgtggagaacttccacaagttgtctcctcatattgcgaattatgtatatgcaccaaacgtatattggaatttgagtacctcaaagcttctgacaatggaattcatggatggtgcttatgtaaatgatgtaaagaccattcggaaacttgggatcaacctgcatgaactttcaacattggtacgttatgtttacaggctttattataggcacttgtacaatggtcaccaataggtgttgatagtgtgtaagttttttataacattattatatgcctcatgatatctttgacaagataacatacgtcaatgaagttaagcaagttaatgatgaccattttgattccctcatgctattagtaccatatatggtttatcaacaaaataaagggaggcatgtaccataaactcataaacctcctgcccacagaacggtcagatctctgtgtgggtttatactgtatagtagacagcctttccttgcattttcaagaggctgattccacaactcaaacctgtgacttcatggtcacatggtgataactttttaagtgttacacataggctgtctttcatttatggagtaatttagtaaaatgtataaacattttgcaggttagtcaaacttttgctgaaatgatgttcagcatgggtttgtacactgtgatcca

SEQ ID NO: 6224 - DNA, 863 bp, Glycine max
  misc_feature (818)..(818): n is a, c, g, or t
agagactcttttgcatcggtatactccagctgaattgtccgaattttccctaggtagaagagataacgacaaaactgaaaagaaatacaacaaatgaggataaaaagtgaagggaaaatgaatcaaaaaagagtctcagagcaacaataaattagactacataaacaccaataatacaatagttgaggacattcacaagggatttaacacaacatctctgaacactggaataaaaggtagagattgtttacccaaaataaaaaaatcaaagcttaggtgctcaggataaaagaactactatacctgctggtttgaatgtgcttcaaatcgaggagccttcgacctcaacttctcagcctgatcatataggttgtagtgaaggtagttacgaagtaacaaattaagaagtgtttcctgcattgaatcaacagtcaacagatcagttaaaaattaaataatttgcatgaattgtttgacggatcattctatattcaaggaatatttattgtaagtgcgtgatttaataaggaatacaattgaaattttaagataaatcaaagctataattacttacaaaccagtcatgtgaattaattgataatccataaaagctatcaaatatgtccttggttttaacatgagctcaattctaacaatgatcataagcccttaagtaaaatagctcaaggaagtttgaaacaaacctgacccagctcatcatggcggagggtggcaatttcggtgcaatgcaagaaggttgctgaaaacaaaaatgcaaaatttaaaattacttaaaattaaattcagtcttgaacctncttttttttacattttacaagatagcacctaactcacccccgaat

SEQ ID NO: 6225 - DNA, 833 bp, Glycine max
cgccagcttgcatgcctgcagatcttgtagaagttccattatattcatttctaagactttcgtcatttgattttatactttttacttcacaaatgctctttaaaagaaaaaagggggaaaaaaccccttgaagttgagcagagttgtaaatagttcaaattgtttcatcagtaagacatttaagatactaaaatgagttagcaaatcaaaacctggacactcaacttgcgtaactctagcctgtatagttgacgtttggccgttttcatcatcagtgtgcgtgatagatatacttattcatctgagttttcaagcaaacttaaaaaattgccgttatcctacactgaatgtacacttttttttatggaagagcgattctgctaggtaacattttatctccagtaagggttctctggggttcattttactttgaacgggaagaaattcaagccacttaaagtaatgtattatgaaaaaaaaaatgaacattaaacattatttacacttattggaaccattggattttagtagtgctcactatccgtttttttttataaaaaaaattacaatggataattccctttgaaatatattaataatttgactttcatcaccatgtatggctcatagcttaagccatttattagcctattgaccaagaatgcgataaacacgttggttccctattcaatgatgagagaattgatgttggctacttggctgcaactttctttggggtttagaattagaaactaaagtgtgttgatcatggactcaagggcaagtacggtgtcagatattttacttttacatgcataaaatcaacggatctt

SEQ ID NO: 6226 - DNA, 893 bp, Glycine max
  misc_feature (855)..(855): n is a, c, g, or t
cagccttgtttgcctgcaggagaagaagacaaaactgcccccttataaatatcaggtccaaatggattgctaccagttgcaggacccaacatcctttgtggcccattaggggcaacaattgaaaaggacctatcacctctatcagacataattgaagatattgttaccgctgaataggtgttcgcagtggaaggaaaccatgaagagaagttgcctacttcttctgcattactcatcctaagtccagaaatgggtggttgagatggtacactattcctagcgggttgtgtggacatcaaaggttcagaggtgacttcatcaactacaggtccatcattcagatcgaaatccctgcggaaactcatctctccatttggaggaccactggctgctgatttcacctgcataagtggtacatccattttatgactactacttaaggtgcagttacccacatcagaagctccatccactaagttcaagtcaagacctaaacctccagaacaactaacatgtgaggccattgatttatttggatcatgcccattgtctgaatgagttccacaatcagtctgacgagcacaattttgggaagaaacatcatcaagtattacttcatcagaaacattcaagtcaaaatccaatggtgcccggctctgctttctagcttcatcattaggaataggggtagttgacatatcaagaggaatttccataactttcctgggctcagctggccgaaatgcactagtagcagcagatcccttcaccaagctcctttttacttttcaataatcttcaggtgccacaaaggggctctttgcagcagcagctactgtgatcgagagataccanagacatggatgaagcagaaatggaccagactgaccatc

SEQ ID NO: 6227 - DNA, 837 bp, Glycine max
  misc_feature (791)..(792): n is a, c, g, or t
ggtggaatgggaaatgagcatttgcagtgttgagtcttgtataattgtaatattgagatcattgttgtcgaattaagcgtgattttgttcttaaccttaagttgttggaaagaagataaggggaaggaggagaaaaagaagaaaggaaggaagagaatgggtataatgagaaggaaaaaaatatgaaaagtgtaaaaaataaactttcttatattttgcagtctttgtcttgttaaacacgtgcatgtaagttgtgtaaacactaaatggagtaataaaaaattaatttatgctaagattattatttaaaaaaataatttgatagttaatatttctttaataatatataatttaagaattaatattcaactcataacataaggttgaatttacaatagacattctctctcatttaagatattgaactacgttatagttatacctgtcttgcttcaataagttccaacatagccctgttgtttgcttccacatctaccatcgactttatagttaacccatccttactcaaattatgggatgtttcaaattatcaaattcaatttgtgatcagattgaaagtatgacaaccaagttcttttggatgtggagaatattcattggccaagttaaggcaggagaaatccaccaaatcaaagaacacaagctggaccactttagaatgactagagccttcaataaggttgttttaacaaaataatggggggaaattgttacactatatttaaatcttttaactcttttttagttttttacttaactgaaaagtacanncagaataccaaaaattagcggtgaccaaatattatgcgatgcagg

SEQ ID NO: 6228 - DNA, 835 bp, Glycine max
  misc_feature (731)..(731): n is a, c, g, or t
aattggccatgcgaggcaaaaatggagaatgttctgctgatctacaacgtgctgcatcattgtacaaccctcaattagagcaaatgctacttgaacttaacaagaaaattggcagcgacgttttcattgctgcaaatacagcactaatgcacaatgatttcatcaccaatcccaatgcttatggtactatatactccttccatctcatgataataaatgttgtgtaagaaaaattttatcattatcattttaattttttaatataacactaattttttttttatatctcatataatattaatgatatgatccaaaaaataaaaaaaataaattaataataataagatttattttgtaaagattttatttttttcatttattgattaatttttcttgatctatataaaatataaaatgtagcatgataattttaatgaaataataaagaagaaatggaataatttgtcatttgtttagtggccttaattgtatacactcttgacatgcttaaatatgtgtggtgttcattgtgatagatacaatgggatcgaatggtataggtccacattatctagagatatttcttatacaactgcttattaaacttggacaattatcactttaaatcctaacattttatgttgtcatattggtataggatttaacacgtcaaaagtagcttgttgtggacaaggaccctacaatggtatggggctatgcttgccagtctncaacctatgccccaccgagacttgcatgcatttttgggatccattccatccaactgaaaagcaaacaaacttgttgtagaacaaatatgtctggctctacaaag

SEQ ID NO: 6229 - DNA, 935 bp, Glycine max
ttcagccttgtctccatttctagcagctctatgtctttcttcttgagaagattctctgaattttcaacttgatgacttaaacgacaatttgcatttttgatttcccgcagctctttatccatcctcttagtagcctcattcagataaacactctcttcttctttcagctcaaacttcttccttaacacaccaagttcctgattgaggtcactgtttaaacggctaagattgctgctgagatgttcagaaagagctttttgttcgatgactttctgggtgagaaagctctcataaaccaagttgaggttgcttagagctagtaccttatgaagtattacactgttttcatcttcagccacggacattgcatctttgaggtccaaaacactcctaagcagtgaatttttctcctcaagcatcatattattttcttcctgaaacacttgattttttgtctgcaaatctatcaactctgcatgcagggctgccaatttggactttgatgcattgtctctttcttctcctttggccacttcagtcctcagttgcctgttcttctctagaagatcaaccttcgctttctgcaacattgaattcttctgtctcgttttctcgaagtcttgctccatgatctttttctctgactccattttttctctctcagatcgattttgctcaagtgaagttaggaggacagaattctctacaaggagctgctgcttctcttcttggcttttcacataagaacttttcaagtcctcaatgttgtccaaaatatgcaatataggcatttcctcttgcttgattcctttgtcgtgcacaccatatggatcaatctgaagagccccacacacttgatgaatagccattttaagctttctaatttcatgtaacaaaaactcttcttccatcagttgcataaagttttcagtcta

SEQ ID NO: 6230 - DNA, 840 bp, Glycine max
acctctgaaatcgacctgcagccatagcactcactgcctggtcaacattcctcttgtggctactatcttaaggcgtcttcattcctgatttcactgcctaaacacttttatacagaaacacatataatggctgtgtgactgacaatgttatacaacaattttctttcaccacttttgttctagtcaaggtcacatataacccatgccacacaacatagaagttaggagactgaagtgattggctttctcttcccctacaacacaagacactgccattcagaaattaagtatctagcaattccacccatgtcttccttttcggcaaccttctacagggacaaattgtattttaggtactgaaaaaagtttgtgttttatgtagttctccattggaaacaaaacaaaaagggtttacttatagccattttcccattttgattctttgtatttttattcattttttagttcaattcttcttgtatttcagaaactagtcttaccgaatttatattgtttaataacattttatattcaatgagaaccactaggtcaaggggtttggggtaaatggataatatacatgaagttttaggtttgaatctaccattgtgcacaaaaaaaaatgaatgaaatttttaatctacggttgtgcacaaaaaaaaagtgaatgaaattaaaaaatttcattcttaaggagatatttagaagaaaatgcaatagaatttacataaaattatgaaaatggcttatgatttttctaaatgtgttaatccaatcatattgggtttttagctttttctcctgtttttctttttggataacgagttaactcgacgactt

SEQ ID NO: 6231 - DNA, 841 bp, Glycine max
aggacaaggagaggtccaaataagcccatccataacattgaaaaatgtccttcatgttcctaagctgtccaccaatctgatttctatacaaaaactcacaaaagatctttcatgtaatgttgttttttatatcaattcttgtatattacaggacaagaacttggggaggatgattggacatgctagagaatggaatggcctgtactacataaaggatcctaatatgcctaccaagagtcactctctcatctctgaatccaccatgactaacaaagagaaaattcaaccataccattgccagatgggacatccttcatttcaagttgtaaaagcgatatttccttccttgtttaagaatttaaatgggggagtctgcattgtgaagtgtgtgagcttgctaaacacaagtgtgtatctttttccattagtaataagatgagttctttccctttttctcttgtttatactgatgtatggggtcctgctaacgtccctaatatctcgggtgctaaatggtttttaaccttcatagatgattgtactcgggtgacttgggttttcttattaaaactgaaatctgaagttagctctgtttttattcagtttgtctcaatgattaaaaaccaatttggagtcaacattaagagaattaggtctgacaatgtcagggactactttaatcttgtgctcaactctttttgtcaaaagaaagggataatccatgagtcttcatgtgttaacacaccccaacagaatgggattgcaaaaaggaaaaatgggtacttactaaaccaaaccagagccttgttttttcaaaatcatgtcccttaaaaatttgggg

SEQ ID NO: 6232 - DNA, 854 bp, Glycine max
gacaaacaccaaaacaaaatcaacattgtcagcaaagtccccacaaggcgtgcctattaacctaggttatcctagttaacagcacatcatccactacttgaactgaatctaggaagcaatggtggtgcataacacaaaattggcatatgatatgatcttcattaataataaaattttttaatgttaggcacttaaacttgctatgctgacatgtacatcactattgctaaacaccccgtaacgttgcccgcgtgtcaattctttatacgtcaatttcaaagtcaaacatcgtaggcaggcaccaaacattcttttgcttcttcaacgacaattaggcgcacggtttaagtttcagttttttccatcactaatgattcctttaaatcctaagtgcttcccttttattgagacacattgagccttatcctgtactgtacatctttcttttgttttcaacgttttcttcattattttccttcttttagatagaactagaagacaaaatatattgatccatgatgtgtttgtttagaatctttagatcaatagtgcttctatttttctttctgggcactgttcaatctagagtacttcatgggaaagaaaatgctggcatcgtcaatggaaaaaattcacttatttcattcatgtcaggcattgtttctgaccctcaaaacgctctaaagagttggaagtcaccgggtgttcatgtttgtgattggtcaggtgtaagatgcaacaatgcaagtgacatgataattgagcttgatctcagtggagggtcactaggaggcaccatttcccctgctcttgctaacatatctttcttgcaaattctttgacctttctggcac

SEQ ID NO: 6233 - DNA, 806 bp, Glycine max
gtaagcatatagtatctttctctaaccacttccactgtgccgatttcgcattttcacaaaactattccagcttttcgctctttattttttcttttctttgctatttggatttgcagatttgaaggagatagcgtctcttatcgagaccggttcgtactcgaaggaagttcgtagaattgctcgcgctgttcgccttacaattgcgttgaggcggaaattgacagcatccgctatctcttcttttctcgatcatgttctcactcctggctctgaagttcacgccaaattgtctgcgtatcttcccaaggtgaacttctatcttagattcaggggttgttcctgttgaatagggctttagattttgttgcttttattattacactcatttgaattgtgaagtggatgaagatgagtagtcgtctatgtttcatttaatttgaattatgaagtggatgaagatgagtagtccctctaaaagatacttctggtgatttcgttactcatgtggaaaattcgtataattttacttctgtttaaagaattaatagtgggaacttgaagaaggtcaatgagcgtagtgctctctctggctttgggaaataatgtgatatttccttcctatgcttttatggtgtgatcttgtttcgactcctaattttgtcactgattgtgtaggatgatgatcatgagatggaagtggacgctgcaacatctgcgattcaaaccccagccaaacacttgttggcccgagctagaaatctactgttacctgcttgtactccttttttctgattgatcagaaaaat

SEQ ID NO: 6234 - DNA, 792 bp, Glycine max
taaaacttacaatgcctttcattccaccacacttaatgagatccctcacaagccctcgtatatcacagcgtgcagagaagttaaccacagcccatctttctattttagttggcttgacaattttctggagaaaaaaaatcaatgattagaaaattcaaatcatttttttatgaaattaatgtaagagtagaataacataccttgttattgaagttccacctcccatttctaggattgaagtcctccccattaccaaatttcaactgcaaacgtaaatttaataatcagctttaaaacccatattacagaactcaacattgataattaaagaataagatgccatcaacaacaaataaaaccacatctcaataatttgacaacatttccatataaaaccagttagaattggttatggtagaacatgaagattatattaccaactattcttagacaattaagcaaagcaatatttaatgctctgagcacaatattaacaaaattaagtcattaccacaatattcatcaatatgaaggtaacaaagtttatttaaaagaagataaagaagacaatgcatgataaaaattaataagcaaatgcacaattataatgacttaaaatttacccgtggagcttgtaaaacccgaccctcaacttcagtaaagttggggcttatagagattccacaattgcgtagcattggttcagaaccataattgctacttttaagtgcctgtaacaattaaaggtatatcaggtaaaccagaaaatatacaacccaatattcaaacagg

SEQ ID NO: 6235 - DNA, 807 bp, Glycine max
tcgtgccctgtcgacactttagcttatgaaagtggccatcaagttgcttatgaaatttgagttaatttatataattacccaaaaaagttaatttaaataatatatttaattaaactgtatatttttccttagaaaatatgagaattaattttctaatttaaaacaaatgcattgatcactgtcaccgaggctctcccaaaactcaaatgtatatagatttcttcttctttgtgacaaatatttgcttgacattcttagattgcgtggtttatagggttttaggagtaccaggtgtaatgaacatcagcaacaagaagtcgccaccacatttttggtgagttgatctgtgatgtttccagtttcattacgaaaatgctccaacgtctgaatctacaaaagattccattgacaatgattcgtttagaagttggagcacttctttaaagtgtaggagaaaaatgaacctcgttttacaccaattcaccagtttcaactttcaacattctacaattcctttagctttaattcccacaatcactaaattcttcttatgatggaacttaattaccaaattatcaaatataaatagattgctgtagaatgattaaaatccgaaaatattgacttggatggaaagaattcctatgcaccggagtgttcataattggcaaatacatatatattttttatgggccaaacagcaatttgaaaatgatttgacttattgcatacatgagggtctgttgggagtgatctgccacgaaaacatagcaatactaacaatatggagtgatttttaattggaaa

SEQ ID NO: 6236 - DNA, 843 bp, Glycine max
catgcaattttttgctaggttgcccgacctaatattaatattagagaaaattacaatattatattcacatatatccatgttaaataggagatcaatctataattgtttgtggccatgaccttaaaaaataagatcatgaagttttaaacttacaaggaggggttctgcttctgtaactccatgttgttgatcttcatgttggttatacaaaatgggttttctcttatctgcatgaaggttaaagagcttgctaagcatgtgaagtctttgacagaagcaaaatatttcatgatgattcattcaagagagaaaactgtcaagtgatctacaaagccagaatttctagtgctttcttaaacaagattaccatcagttgtttccttcattcaacgtacccggactaacaattagacagagtgaatgatatatacttgatgacatagtagttttaaaactttcaaagaataagaagaatcacatattattgcagtagcagatgtacacagaaggtcctttgtgtcccagtttaagtagtctatctgattttgtttctacttgactttgtgtatcaaattctaattaattctcctctagttacatagactaaataaccctttcactctgtctcaggttactcctaagcttcttttttttgctatcagtatacttactatagtttgggtcaagtaaaaatttcaagttccgttaactttgcttaacttttactgttttaggcttattaactagaattttagctataggtatagtattttcgaacttgaaccttaactttttagaattcagtgacaccaaggaaaatgtttagaataataattgaaaaaa

SEQ ID NO: 6237 - DNA, 821 bp, Glycine max
ataagaaaatatgttttggttgcttcctaacgaatgattccggttcgtttatcttataaaaaattcgtctgtggttgatacatgttggttttcaagctgtgatatttttgagacaagacagattgcaaacttatagttgattgcaaagaggagatgcaaaatgtgtcatgatatatgaattttgctacatcatactggggacatccttacaactaattcaggttttaaacttcatcatgtcaagagaaaaccacctaagttagctagagcatctatagctcatgctttctctaatatattcctggttgtatttatcatactgttgaaatggaaatgatttgatattctttgcaagatacattaaattaaaaagttagaataattctatatgaattgatgtctctcagcaaaccctattatcccttggcaacaaaacggtaaacaacaacaccaaccctagacccatcacaaggcgtgtcagtgtgcaaaacgtcgacgttgaagtgcttcctcgccttcttaaaaaacgcagactccttcttccacctcctcatgtgagccatcacaaacaccatcttcccattcctttcacttagcatcattaaacgcagcgtttcgagcagtggctcgtacaggtgatcgtgatacaccacatccgacgccagaacgagatcaaactcccgcccaatcgcttccacgtcagcagcgtggccccaacggagcggcgcgacggttattacccctccggtgggccccacaaccgcggcgttggcgtccgcattgaatcggagattgggaaccacgtgaggaaagtccgtgag

SEQ ID NO: 6238 - DNA, 848 bp, Glycine max
ttgcatgcctgcagctaccatattaagatagacttgtgcatccataaatttcttcttgttaattgatcacaaattcagagggcgagccctggtgcagcggtaaagttgtgccttggtgacttgttggtcatgggttcgaatccggaaacagcctctttgcatatgcaagggtaaggctgcgtaccacatccctcccccataccttcgcatagcgaagagcctttgggcaatggggtacgaagtttttttttaattgatcacaaattcagtagagccacatggcatcaataatatgtttcccacagttattctttagaatagcctatgatgtttaggtgcaggtttgcaactttctcagacacgatcactacaataagaaactcctattttgtctacaattcataggttattgatttcaaatatagttgattttgatttcatttcttgttttggaattggtttgcacttcagtcgattaatcatcttaccacctttgatgatgcactgtcatctcacagattaacggtctgatctaaaattgaatttctgttgagtagaatgggtatagttgaattcaattcatctgttatactattttcagcaacgtttccgttggatcttgtgaggcggaggaagcaacttgagggggctggtgggcgagcccgtgtgtatacaacaggcctctatggtgtgtttaggcacataattcagacagaaggggtttcgtggtctctacagaggaattctgcccgaatattacaaggtggtgcccggtgtaggtattttgttttatgacttatgagacgttgaaagagcttttagccagatattggtactgcataactacc

SEQ ID NO: 6239 - DNA, 846 bp, Glycine max
aattttccaagactgccaaatcctagttcgtcccaggcaagtgaagccagagaagggtgagaacaatgctatcacagcacatggcagaacagaccctgcacaacccacaggctttgttttccagaactgcttgattaatggcactgaggaatatatgacattgtaccacagcaagcctcaggtgcataagaactatttgggtaggccttggaaggagtattctagaacagttttcattaattcgttcttggaggtccttgtgacaccccagggttggatgccatggagtggtgactttgctctcaagacactttactatggggagtttgagagcaagggtcctggctcttatttgtctcagagggtgccctggagtagcaagatccctgctgaacacgtgttaacgtattcagtgcagaatttcattcaaggaaatgattggattccatctattggtagcccatcgtcgtaaattttgaggcatcagtagatggggagttttatttagggtacccccttgtaaattaccaataactaatgcaataccaatatatcaatccagattaggaagaaatttcaaatcaatttgagtcgtgctggtaaataccaaggggttgatcacacttcactttattggggtgacacttgtttggataatttacaacgtttatttcaagattataatatcttattttttccgttctcatgtttttcatttcttaaaatggttttttcggaaacgaaaatggataatttgaaacaaacaaacgccttggtagatttttattttttaattagtaaatttagtaaaggagggtttacatagcatgacctgatcaatgataa

SEQ ID NO: 6240 - DNA, 852 bp, Glycine max
  misc_feature (775)..(775): n is a, c, g, or t
attgttagaaaataaaaataaataaatgtcatacattctaacagattaagaataacaagaaacaaatatcagaatattattcttgtctaaatgagtctcagttcttatcttttaaaccgaaatgtctttagaaatttgtcaatacaatgggaggcatggtcaaatatgatcaatgcattggaactaatgaaagcactagggcaatcttgtaaactgattatcaataagcaataatatgtgtcgcattacacagtatcaaaaagtgcatgaagtgtaatgaagtacaattttatcgagttttttattttagagggggtatccagattattactcgaaattatgaataatttatgattggctgatagtcattagcacaaaaaaaggaaagtattagcacggtgttgagactccgtagcaagaagctgatgatccaacaataaaaatgaccttaacataattttggttcgagggaaatggaggagaggagaaggaaggggagggattttttttaaataatgattgtttggttcaatatttaggaaaggtggggaggggaatgggaaggggagcaaaatccctccacatctaagttgtgttcccctccaatattggagggatttggaaggaaggggaaggggatttaaaacatttcaaattaaatgacatttaaaattataaggatacaaagggtaaatttatttttaaaaccctcccctgcccttgtgaaccatacagggaattgactaccttcccttctctcaatcaaacataatgnctaatcaaaatcccttctcttccctttccctccccttccctttccttctttgaacccaatagccataaagaaaaata

SEQ ID NO: 6241 - DNA, 938 bp, Glycine max
gctcgaaccccgtcacacctctaggatcgacctgcagtttgttactcatattcagtaaattcgatatgtacttgttctagaagattgagtctatgatggcataaagttcttatattccctgctgctatgactcgaagtatgtgatgaagatcagtgaaaaatgtagttgcatcagcaacaggaaaaagctcttcttttgctgcaagtaataggcaagcatgcataagatcccaccttgagtggtgataaaattaccaagtttatcaataacaaattcctgttacttaccatccctatctggatatacatgaataaccccatcttgcatttcaaagtaatgctgtagcacgaaagaaatacaactaattttatcacagcatagaacatagggagatccaagttttcagtggtgggagaaaaaaactcacatcagaatttccttcaagaatgtataaaaatggatctggattaggcttgggtgtactggggtcggatataacttctttatcccatggagcaacagcttctctaaaaacgtatctttttctcatttcaaggcattcttgcagaaccacataagcttctacttcatcaggtgacggagcctctaaacaaaaaatataacaattaaagtttgctataagaatttccagatatgtaaatattggcatcaaaaaagtgtttgaaggaggggattctcaacatccaatgagaaaacccattccaagcaatttatttgcactcaagagaatgagcaagagtaacatgtcagagttcataccaagaggagttattctcaatcttgttgaaagtttcatgctctgggctctttcctcaaatgtcagctgctatttggatcaggctgcacaccatgcaggtcaccagaaacactatgagagcggatcatacttcggggtaaatgccatctgctctccatg

SEQ ID NO: 6242 - DNA, 1060 bp, Glycine max
tcgacctgcagcagaaagagttccagaaattggtgagggagacctgggctaatgatcagcagggaggttgggggagtattgcccttaaaaataagttgaaaaacttgaaagctgctataaaacagtggagtaagggagaggggaatattgatgttaacaggatatccagcattcagaagaaattaaatgaggtggaggacttagcttctaatcgtatcttgtctgatcaagaactcaaaatcagaaactcccttcagcaggagttatggaatgtatcaaatgcagtggaatctcttttgagacaaaaatctaggatatcttggttgaaggagggggattgcaattctgggtatttccatagaataataaattttaggagagctttcaatgctattccaggcatctctattgatggggtgtgggtccagcaacccaatacagtcaagaatgcagctgttaattatttccagaccagattttctgaacagcattattctaggccttatttggatggggttccttttagatctatttctcaaaggcaaagagagcagatgattgcccccttctctgaccaagagatcaaagatgctgtgtggagttgtggaggcgacaaatgccctggtccagacggttttaacttcaattttatcaaaaaattttgggatatcatgagcccagagtttagaagatttgtagatgagttctatgtcaatggcagctttcctaatggaagtaatgcttcctttgtggcattgattcctaaaatgaatcatcctcagtccttcaatgattataggcctatatccttgataggttgtatgtataaaattatagccaagttgctgtctaatagattgaggtctgttatggatgggttaattgatgaaagacagtctgccttcattaaaggaagacatatcctccatggtatcttgatacttcaatgaggtggttgaggaggcaaggagaaacaagaaaccagtgatgatatttaaggggggatttttgaaaggcctatgatttcagtgtcttgggtcttttttggactacatgctgt

SEQ ID NO: 6243 - DNA, 899 bp, Glycine max
gtagagtcgacctgcagtaattctaatagaagtgatattacatatttaaacgacattttgaagataatatttacagaaaatgacaacctatttaataaatatcaaaatgatcctattgaaagataaatgagaggtgaaatctcttatcaaataagaatgagaagactgaacaacatataagtgaatacaagattcataaatgtaagccttaagattttgaattaaagtataacgtcaaattcacttatgtaattattcatggcatattagtgtaaatctctctaatgtttactctttcttcaatggttttcgattgcacaacaaaccctttaacaaactcaaaagtcataggagatattataatttgataagcacaatagattccaattcttaatcgtcttaacttgacaaaaaaaataataatgggaaagtaggtgttcatgtagccattcattaggaagctgggtcacttataacactgctacacagcaggatacctcttcacttgctgataatcacgtgagcaattcacccttaagtcttaaaaagttttttttttatttgcttttcttttgaaaaagagaagaccaaacataattttataaaaactgaaaaaataaaggacagttttttactgaactaaaataaatctccaagttgattaaaagagcttttacgtctctattcttagtctcccccctttaatttaaaggtaattttaaactaaaacaataataaaattaacattttgagtccaaacttcgttacaagtaatttatcatttaaactttgttagaatccaacatgcacacaggattttgagtccaatatttaaacgttatgaattcaaatgtgagattataaggcataacctttcaactacaactgactagcttttg

SEQ ID NO: 6244 - DNA, 854 bp, Glycine max
tagtggagagaccacagattcactatgggtggtgccaatttcaaagagcccaaaaacaagttgttaatggttggattataatagtgcctaaccaaactctaaaaatagcattcgcacagcaattgcaaatttagttgaagctagctaacactatggccaaccctttattttttatttttcttacttaaactaaagcaatgagacaaattagtgtttatatataattggtcccgtgtcaaaaacttccaaatgaaatggtatatttgttcgaaaaagttcattaaaaaatagcattagcgattaggaggttagtgcggcctatcgctgtctttggaattgcatttaaatctaattaactcttgcattcgatgaatggtgaactatgaagcaatcaattttgatttggaagtattttaagtgcatgtttgaataggcggtgtggtcaccgcacgcaccatggtgcttatttttccatggtcataacaaaacaacactttgttgcttctccattttcaattattcaccatgatttttggggctagaatcaattttgtttggtaaccaaacatgcagtagtaagacctttccgcaacatgtgattaccgctaacactattagattattagtacctcatgtgaacaagaatagtactagggacaattgtcgacagtggttggtcactctacgtcaacggcccatacatatgcgtccttgtttagaactttgataatgtgaatatttttctggtaattacaatgcccaaccaacggtgtttctttatcaaatttcccagtgcccctagcaatcgctgagctcagattcctttgtcggtcacgtgcaaggcggtttcaaca

SEQ ID NO: 6245 - DNA, 862 bp, Glycine max
aagtgaggaagttgtactgaacatttgttaggttactcagctattgtagattgaggtgataggcaaaacaatttaatctcagatgtagcacagaaacaaatcaacaaactgataacaataccattcaaatttgtggttgtgtttaaaaacctaaaaagactgatttttgtgtcctcttagcagtatattttatttgattggctgcaatacatttgaggcccattattggagggttcaaagtttttatatattcaagctgatgcatagtttgttgatccttctcgctgtaatgattcaactgattttcttttccttagtcatggctcagtattcaaggaagtttgatatatctatttggattggaataaatttctgtttggcattcatttttttgtgatttgaatagtttagcttccaaactgttggtggctaatatggttcttaatagagctcacatattctgtttcatggtctatctcattgagttgagttcggctacatctccgtactgcatctagatggccatttgattgtggaaatgtgcagatactaaaaactcatctgccttctctaattattcaacctgttagctctgattgtgtgataattcagcaaactggttacactgtcatattcaatctttgtggaggttttaattgtcaatatgtttgattgtttatgctatactatctaatatacattgctttatgtctggcagtgggctttgaatatattgaagaaaccaatagtcacttatgaatggttaaaacaatgctcagatgagccatcgtgttggttctcaaagatcatacaaggtcctttctttctttgggttaaggatttgggtactggaatcccagca

SEQ ID NO: 6246 - DNA, 828 bp, Glycine max
tagggaaaagaagtacctagaacatttataacatacacttggtcatgcaagagctcctgcatatctttggagaagatggtgaactgattccacaatttggatgttgacctgacaatcataaaggagaaaagtaatcttctactcatgtcagagatcaggagaagcaaacaactttagcgatctcttctgactgtaatcatcaagggaatctcaaatgtacaagaactttagaaggggtactatccattatgtgagcgtaaaactgacttctaaccataatatccataatatatatatatatatataagtttaaaacaaaaattccttaaaagtaagagtcggtgtaataaatatgtaacgataattttcttctctctttttcagttatattatgaacaaagcattgggatttagaaaaggaaacatgacaacaagtacaggaatcccctttccagtatgccattatgtgtagcctatgtgtgggtgtgtttttgtctctgtctgtctatattctatcattgtcagtctacctgactcctgactcctgactcctgacaaggctatcaatctgtaatagtgccagaactgcattgcatgaactgaaaacatttccatttaaggatatgaactattcccagcagattaaataaacaaagaagtacaatgaattctgtctaactttatttttcttgacctctttaatgtacataatagcaatttcaaacttagatttttgggtttctttagcttggcattcagaagtaggaaacaagacaaactaaccaccaagtcccaaaaagaggaggactttcacatccagaaaatcaa

SEQ ID NO: 6247 - DNA, 819 bp, Glycine max
ttttgagataattcattgatgttgtgatatcttcatctcatctatgcaagttttctcctttgcatgattcttatactgcttgctgtattttattaatggggataaaaaatctacacaatttggcttctggttatctcaagtatctacaagtacaactactaccctgcttgttctcgtctattcaagttttcctttacatgattctcgtactgctaaatgctaattgtattgaaattaaataatgggaatgaaaaatctacacaattttcttctggttatctcaagtctctacaactacccctcttgttttcatgtagttttgctgtacgtgcatagcttgcttgatgtacacactttcctattccagtagttaattccatcactttgctctctcttcttcccttgaaagcttcctacaccaatcaaattacatgaaaaatgatgaaggtctgaattattttatactggagtgggtattacacaaatagaagtaataaatgattaattcctataaactcaatcaaaataaaagaggatttatctcttggtgactcaatcgatgtacatttatatgtctgccatgatcaggacgatggttgtagttgggcgatcaatttcaattgcactgatactcattatatgatatatatgatcatatactatcgtatttaagttcttttcattatacaatgcgatgatgggcggtgtaattacaccaagcaaacaagtggggaataaaaggcataaaaccccatttattccagctaacttttttcttttttgcttctacctaatcaatggaaagcatttatatttaat

SEQ ID NO: 6248 - DNA, 833 bp, Glycine max
tcaatacgctaaagttgggtttgccgttagatccaactaagatatacatgtagagaagaggccaactattgaattgtttgggcaaggagaacatgtttcaaacaagttaatatacaactgtcttcagatgtattcccgccaaaaatagtaaaagggttgaaaactccatacacgtgaattaatggtaagataaccatattggttattgttcttagatttttttctcaaacaaccaacgctcttaattatgggttcaaatgcaggagaagaatctaccgtgatcgccattgatagcgaccggaacagcccacacgccgtcaagtgggctgtggaacatcttttgaagaagaacgcttcttgcaccctaattcacgttagaaccaagaccttgtattcacgtaggtattcttctcctcacctcctcttattatatttgcctcaaacttgtaacaatatatttaccctgtgaataaaacgtaatacgtacattatgtttttaattaattgcttccataatcattcatatagataatatattatatttaggcaaggttttagaagatgaactacaacttcaattgtgactgcaacctcatttttttgaatctttaggattgctttgaaagtgtaatgtaactgaattggtcgtatttgttaacagttttatacaatattaagaattacaagaaagttgaaatcgcggtcacaatttaaacttttgcatacatgagcttaatttctatatggacaattaattagcttcattttttaggatgtatggatcaattctttttttattatatttatgcagatgattttgaggttatccctaa

SEQ ID NO: 6249 - DNA, 832 bp, Glycine max
caagcttgcatgcctgcagaggttgccggaggaccggggttggaggagttcaaggatgtccccgtcgaggttttcggcgaggcgttgctcgctgggtatggctggacggaagggatggggattgggaagaaggccaaagaggacgtgaaggtggtacaggtcaaggggagaacctcaagggaaggattagggttcgttgccaatgcttctggcaacaatttgaatcactgcgaccatcatttatgtaatttgcagttctagtattcacaccttagtggtgggttctctagtaatagagatatgccgtacagaatcaagggtctattggttacaatagtattattctctctttctctaatcatagctctccaagttctcttttctttgggtcaatccctatggaagcttgattcctaagatctagtacgttgaatccatgctctgattctgtttcttttaatttgatatttgttgtttccaaatgctgtctccatcggcattatgaattggtgattctatgttgatgttgtgggtgtgtggttcgtattgtttacagaaggctgtgcgttgccagtagtgtatgaggatcgttattgttatggtggcaatgttttatacatgtctttggcatgcagtgggtaaataaagtgttgggttgtgatgataactgatagtttcagattgtttttcttgtgctttcaaatttgaactatgaaatgggagaagacacataatggatttttgttgctagggagttgagcaaaccccattaatcatctttgattccatcattttcttaaaacaagtaacttggttaagctatgtaggggat

SEQ ID NO: 6250 - DNA, 897 bp, Glycine max
  misc_feature (876)..(876): n is a, c, g, or t
aaagtaacagtataaaaataactggcagaagtggagatcacagtaaatatccgagtataaaaataacaacaaaataataagcacaacgtaaaataggcagtggaaataaacacacgcatgcattaacttgatggacaatggaaaaacccaacattgaaatctgagaattgattctcccatgacgcagaagcagctccagggtaacttcacccaaaatcaattttcaatacgtcaatcacgtccaacacaataatcaaacatcatggtctccccttttttcacctttgaccattcctgatccacgtccaggggttgccaaaggagcttcaacgcttatatgtctcaacaaatcattcctattcgtcttcttcttcctccagcttttctggttcttcaatgaagacttcttttatatgtgatattttggaccaaaactcaccgacatggggctggtattttctacatagttcaggacaataggcaattctcaaactttcaagtgcggtgaggtgatggatgttatccgggagagatataagctttggacaatctgatataagaagtactttcagattagtcatagttgacagccactccggaagcatttcaagattgtcgcagtttttaatacccaaggtctgtaagaagttggcagtttcttgaagccattgtggtaaggccaccagctgtggtaaacccacgaatgcaacacattttaacttcaacatggggctttgttcttcatggtggtccctccacagatccaagtccagattacacaatcttgacaaccagagtttctaattcagggaaaattgtacattcagtggcaagacttagactatgacagtaacacatacatgttttagagcaggnaactcacccctcaagaagact

SEQ ID NO: 6251 - DNA, 829 bp, Glycine max
ttggtttttaaacattgcatattgaaatattttaataggtggaattggtttcttttactttattcatacttactattactataaatgtaaatattttctgttttcattttatgtttttactaataactaaaacatattatgttgattatatggtagaaagttgatttcatttttatttgttacatgttggatgtgttactatgacactttcacatttatgtagctatcacaatttgattaatttggacttgttgtgcagagagagatcggagctcaaatgaaactgttgacaatgaatccccgaatacaaaaaatgtttttatgcggatatctgatgctgcaaaaggcaaactcatggaagcaattcagaaaattatgaagatgatgaagaatttgtttcaaagtacacgtcactggaaacctgcatatgcaggaaaatctaatttatccaaagataagctgagagtttctgtcatgctttccataatgatcttcctaatggtggtggtggatcgtttctatttaatctaattcattcaatgagaagctgagaacttttgtctatggccaaggcacgagatagttcaacaatgtgattacaattctctttgaatgtttggccttattttctatgggtaaaactttgggattagtattagttttttgttcctttttgcttcttcctaggcaaaaaaaatctgagtaagctatcatatggtgcatgaattctatctatagatagtctttctttgcttagtctttgcttattatctgcaagatggtttacagttatgtcatactcattgtgatttgacataattagctcggc

SEQ ID NO: 6252 - DNA, 887 bp, Glycine max
aattttgaagaggatgcagcacatctattcttttcctgtgataaggtcatgccgctatggtgggaattgatgtcttggataaatatcgtgggagctttcctgcaaactccaaggcaccatttcctcctgctggctttcgggtaccaggatgcagcgctgactaggagcatttggcaccataggaataggattgtcttctcaaatgaaaatttcagtgccaacaaattgatgcaggatgctatatttatttgctggacatggcttagaaacctggaaaaaggatttgacttacctttccattactggtccagtaatatcagggatggtttttgtaataagggggggagtattctatagatactgggtagttatataccaagcttacagtcagatgtatggtagcctaactcttgttaattagcttgtattaagataccatatttctgcatatcttggtgctgatttgtattttgaacagtacctcttgtacttctggttatatctaatataatagtatttttgcagatcaaaaaaataaataaataacataagataaaacatattacagttttcagcaaacatcatccacagaagcaatcaatatcaggaacaaaagaagaaaatcattagtcaaatagtattgattatacctttcattaaggctgtaagtttttgaattccaccatagtatccaaaaactctgcaattatataatgaacgagtgataatttttcagcgcatccaaaataaaaaatccttcagaagtaatgaacaattttgcagcagccccagataaaatctggtgacgattgccccatgctgggtgttgactgaaaagagggaaacataaatactgtattacatgtaactgtgtagcaatgacagtt

SEQ ID NO: 6253 - DNA, 835 bp, Glycine max
cgacatttagaaagactatttgttcagagacagaaaaagtcttttcctccaagcttataaaaataataacccaatttttccagaagcaggaaaaataggataaaatttgatagttgtttattaaattacaggtgcaatattctattaagaagtgatgaaaataagaagcaagataattgtttcttgcaatttttgaatcaagcaaagggtgttatatgagtgtctttcttgttaactatgggctatggcaaaggaaaagacatgtaattgtaaatggtcaaaggcttcaatttatataatcttgccaaaatatggaaatgacattttgtatacagagcatatatagtgtcttgggtatatttttggaagtttattaaaaaaagtcattgttattgctaaatgttttgtgcaatccatataaacacttatgacacatctgatcaagtcttataatcatactagtgtgaccttataaattccactataaatattcatggaggtttggtagtcttcccgatcttataagggagggtgtcttttcttatctaaactttacttatatatatatatatatatatatataaaatcttttgtgcaatccttaatgatttctagtgaagtttttaatttgtatcgctttagcactactgagaagaatggtgtgtccaaattgcatgtgggtagtatatatatttgagaggaaaaagaaggaccttataaaaagcattccagcgggaagcgccaacaacgagaattgtgataggaaggtggcaaatgatgtaaatcaggtaagcgcaatgggaaaacgtaaatgccattgcaggactaaactcct

SEQ ID NO: 6254 - DNA, 823 bp, Glycine max
gtcccatggattgggactttgcaggaacctggactgcaataaacattcggtacagaagttctctataattctgtattctttgtgcaaggttcattatttttgcatctgttctcaccttcatatcactttatggtttacagagggccagcggatcatggcaaattacatttatatagtgcaggtccttcatatcctatttcggtatgttcttaaaatatagtgatatggtcttgctgcttgctgctaactcattgtgtaattggtgtgccaaaatattttcatggtatagttgtataactttatgacacagcgctgtgtctttgttattttttgatttatagacttgttattgttgagttttggttctacacaatttcttgtcttttatcatgttttggtcttgggaaatgtttttcttagtttgatctataataagagaaaaaggtgagaataataaaaatgagaatgttaagagggatatgtgaccatacaagaaaagacataacatgaaatgattgtacactatgaggtgttggtgtgacaccaatcaaggaaatgttgacaacatcatttaaagtgatatgaacacatataaagaccattggaagcaccagtgaagaaagtagattgcatggttttagtcctatgaaaaggggaaggggattttatggtgaataatatctctaaagattttggtctttgaccgagtccaatggcattggtgtgatccatgtagccgatctcacctagtggctagtgggacaaggcttttggtggtggtaatctataataaagcttaacagcaaaggtttttttgtgtagc

SEQ ID NO: 6255 - DNA, 802 bp, Glycine max
aacgtgtaaaaaattagactgaagggaaaaggaaggagaattttgatttgttcaacaggtttacaggatattcctccagaaatgtctttgatcatatcaaatggacctgcaactccacccatatattcttattttcaaatgacatggataaactccaacagaatttcagaaataaatgccccgacaaagcacaaaacacacatttacctcaaaagaattggctgggaaagctaaaagatactgcatacgagctggaggacatcatggacgaatatgcctattaagaattgaggttggagcaacaaggagaatcatacaaggtacaatgctcttgcttatcctctttgcaaccctagcatgttgttttccgttacaaaattgctgagagaatcaaaagtataagtgagagattaggtgatattgctaaagaaagggagcagcttcatttgattgagacagactcggagagaagaagtggagtcgctgattcgcgcaaaactaacttctccattacaattgataatccgagactactttcttttgagaacagagaaattattgaagttggttttgctttcgatcaaagtcttctccattgcatgattaactaaaataaacaactaaagtgccaccgttggttggtcttttacacccagttaattgttaaaacatttagcaatgatttgtagttttaagaataaaagaaacactctaattatatatttgtttacaaatatttgttacatctttgacaagtgtaccaaatcgtacaagtaatataaaataaaaaatttaagtatcg

SEQ ID NO: 6256 - DNA, 877 bp, Glycine max
ctctagagtcgacctgcaggcgtaggttgtccgagcatgcgtgactaacaacgtgtggttaatatctaaacttcgggtattaattatcatgcacacatcaatccatgctttatcaattcgtgttatttataaattattattttttaattttgttctttatattattttcaacacttaattatcagaaaaaaaaatattaaaaataaagattattattggtccatatatgaaaataatagaataatagatgaatattaataataatatgaaaaagagaatgtgaaatgataatttagactaaacatttaattagttattagtggaattaattgaatgtataattatattaggaaataattaattttttttattttcagacatatttaataatttaacttttttttttaatattgatgattcctgaaagtgattaatatataggaatcaaaggaaaacaaatttttaatcccgggtgtcatggaacacaaatggaatataatctctcctaaacgagaatttaagttttcttcaagaaagcgagtgcatcatattagaaaaagaaaaatcaagaaaggacgagcactcggcttttagtagtataacgtttctttcactctatatttttaaatttttttttttataaatcgataagttccccactttctaattgggatgaaaaaggagtgtaattgtgtaaaaccatacataagttttctctgatttatatcaataaaggatgtaatgatagccgaataggtctaaaaagtagaatctcaaaatatgagtctttgttttgatttggaagaaagcgctgctggtgagtgctatgatgttaacagccacaaaaataagcgactgccgaaatttatctatagtc

SEQ ID NO: 6257 - DNA, 874 bp, Glycine max
atgcagatagagtttcttcccggggagactcttgaaattatgaaatactactattgcttcagtcatggtaacgtgacgtataatgtttcacacagtagacgttgtggccatatatggttatgacatgcatgcttatttacaatgctactatttcacgatgccctaaatctaatatgggtcatgcctgtctttggatgataatgttggatccttcattcaagggacgcacacgtgagagacatgtttgccgctactgcatatgtgctcttcatactaaagtgcacaaacctagctagctcccataatatctattatcccatttgcattagacatgtggggttttacgttatgaccaaatagtatatatatatatatatatatatatatatatatatatatatatatatattctagattattgatttactcatataatgtaaattgtccaaaatgtttacataaaaaaaatatgtaggttattcagtcataactaacttgatcaatttccattagccccctctttcttaattaataccacaaaaagcaaataaaaatgcataacttattattattatttttggtggtttgttgatttaaacagattttgactccactacccaaaaaagaaaagaaaaaatcagattaaaaaaggttttaaatttatgggcttttcagagctgtatatattaattaggaagctagatatctaagtattaggaggggtttattttcaaataaggtcaactttgaatgtaagaagatttttttaaagaaaaataagtgacctacttttgtcatttttataaaataatttttttattaccatattattgatatagagtatctattagttttattactgactaatcttatc

SEQ ID NO: 6258 - DNA, 869 bp, Glycine max
attaagtaattaattgggtgaatgtgtttgacaagaattctttttatgtatatttaccaatactttcttctattttttatttatttatatgtacttttctgtcataattgactttgatttcaaaatttcagaagtgcaagttggcttcataatacatggattaaaaggagcaagatcctaatgaaactcaggcggtaagtgctcccactcctatggaatcacctgctgatgccaaccctcaaccatcattaggtgttccatcttcacaagaggtaggtagcaagaggagactaactagaccttctagtgcacgtgcatgggttcattttaaagagaggatgacaaggttacttgctattattatggcaaagcatatatgcatgttatagcatgaatcatggagtcacagacttttgttatcgccattacaacatacataagaaaaagtatcttaaggcattaatgtttctgcctttctgatgcattttaatttcctatgtatcaactttgtcatttgtcatctctttaattaaggaccaataacaatatacgtaaaaaagacttgcgtacaaatattgatataattctatttctaattcattaacgtaattacattccacttaaactcaataaaccttgtttggtttcctttatttttaacaattgtactaacttttgactttctaatgtgatttcgaaaaagtctggtaagttttggttcttttaaactagttatacgttatttttaatatgagacttagataccttttacataaattgtatttagatcttttgtacaactctctctctctctctggctctttctatatatatatatataaacaattgaatcacacttattaaatttt

SEQ ID NO: 6259 - DNA, 873 bp, Glycine max
  misc_feature (840)..(840): n is a, c, g, or t
aaatgctgctgctgcaataaaacgaccattgggtgatatagtagccatgttatttttcaattgatttgtatcaacatgcccaacactcttcccagtttttccatgccaaagaatgatgtcagtccctgaattagaaatcaaatttagaacaggttgtagaaagccatcatcaagcattagatctcagcataaagacagcgacagtaatttcatcagcaaattaaaataagagtataatacagtgcatttgatttagtgagtattagagtattcttaccccattgtattgacttttacttactgttagtgagctgtcaccatctgtaaggtagttacagttactaactgtagttagttagaaactgtcagggttagtttacagttgagagttagttacagttgagtctctctatataaagagatgacactgttggttgtaactctgtctaatctttttcagatcaatgataaacactattttactttcaatcgaattctaacatagtatcacagctaggttgcgatctgcaacaatttttttggggatttcctcatcttttttatctcttcttcggtttcaatctctgtttttcccctcctcctccacctatctccgctgtgctcgcaatcgtgatgactactccagttaacaccggtggtgacagtggtgatattccaccaaacgatgaccatgcgcagctgattaaccttcattcggcaaacacgaacttcaatcacgtcattacaagaagcttgatgctgtgagttatctcttctggaatcacaggttgaacctgtgattcgcagccatcgtcttctccatttcattcaaatgtgcanttatgtttgcgacattactgatcggatgctgga

SEQ ID NO: 6260 - DNA, 836 bp, Glycine max
acctctcggatttggtttggctcgtaaggtaattaaacccctaatccgaaattttaagtagcagatggtttggtggagagtggacaccttgaagaaagtactaaaatagtttttagtttttagttttgtggacagagggaccaagaagggcattgggtatatggtaaatatttatgaaggtttggtttgtaagaaggccaaatggtttttgttcttctcgttaattgtaagaaggccaaatgcatctaaacttttattataatgtgtatgaaaaaataataattgtgttttattgtttgccaccgctggacatggattgcattcattctagaagatctgcattgctttttatgtgaatttgtcgttaatgttgatcccggatgctgaagcaaacacaatttgattttttcaataaaagttgacatttatactttgactcctgtagtggaagcaagtcgaattcgcctaccacgtatggttcagcgtgtttggatttatactattaagaacttaaaaatgtcatttctcagtatgattcccataattccattacacttgtcacttttttacatggtccaccgcttgtttgctttaaggctataacgattttttcatccgatgcaacacaaatacttcatttgaacgacaacgcctgacgctattaatttattcagatagcggtaaggtactccttggctgtgctgtgaatattaaattccacatagcttatttttaagttgtgactggaaaaatgcgggccccccccttggaatgattatttactggtgtcgtgtcgagattaaaatgttgaaatagaattttttgttttacactca

SEQ ID NO: 6261 - DNA, 838 bp, Glycine max
ttggcacaaactcatgagcattttgttctggtggttccgggatacttattttgtatcctagacatcagtcatgcaaccaaaagtaggatattatatttcaagaaatgtgatgaaggagaaaatatagtttttatgaaaactagggagctttacgacccatttgtttgaactaagagtgctagtaacacactccttctagtacacacaatcattggttgaatttttttgaaaactacaaaatcaggaaagagacttgttagataagaagtgagacccacatatttgtgattttcaatgaatttacgacccatttctctttcatttgtctatagtttatacattttcaaaattcttcaacccatacttggacattggatctcgttaatgcgatgccctgctttggtttcaaaatgcagtggttacttagcaccggaatatgcaatgggtggccagttaaccatgaaggctgatgtatacagttttggggttctcatacttgaaataatcagtggcaaaagcagtgcaaggacaaactggggagggtccaacaaatttctattggaatgggtatgtagttttcagcttcccatatactactccagtctcaaatatacaaaaaagataccaattgcaccaatccaaattaaaaactaaattcttccccaactgatccttcattgaaacttggaattatgaatagaaatgagtcattcctcaattaaataaaggatattttagagataatagcgtagttgaaattttcttatatttgagaccaagaaaaatgggttttttttttcttatgtttgagactggagggagtatatatatgcaactt

SEQ ID NO: 6262 - DNA, 812 bp, Glycine max
ctccctagcttctagtggaagctagttagttacttagtagaagctactcagttgtaagtagttagttagttgttagccaattctgttagagactaacagcattgtctatatatactgtttgtaaacctgaagttcttcgagtcaataaatgatattttatttcttcattctctctctctcactctctcaattctcttcgtctagaaactctatgatggcatcagagcattgcaatgatggcgttataggtgagaggcagtgaatcataaacagtcttgctagccaccatttccagtttattgtgaaaagtgtgggctgatccttcttcaacaatactgctcaccctttctttactcgaagtatgttcaaatgcaacataatcttctttcttgccatggacattacatccctcacattggcatccactagagcatccaacattagcctgataacattcacaatattttttcagacacattgaccttttgtaattgcaaccgcttttgtgccttgccgatgatggtgttgtcagattttcatcatccatatgtgaagaaatatcagtggtaggctgaacaatcttgggagcaaatgcaattggattatgggattcaatttgttgtttagtctcaacaattgtctctgcatattttggtccgtttaagcagccttggcaagcacaagggttggtacagtacgttctagtagcaaaacaatcacagtaacacgacctacttgctcagcgagtcagaaccgcccagcccaaacaagccacttagtgcaagaagttacattagaagacagctgtcatg

SEQ ID NO: 6263 - DNA, 866 bp, Glycine max
  misc_feature (794)..(794): n is a, c, g, or t
  misc_feature (857)..(857): n is a, c, g, or t
atcctcatctttgactctatttatcattgtatctcttctatattatgaatgaattgcactaaacatttttcttttaaaaaataaaaaatggaaagcttttactagaaaagaatattctttttataaaaaaaaaatatttattttattgtattaaatatacaagtcatgttgttgtttatgtaatttaattttttaataaaatagtaccatgaaacacatggattaattgatccaatattatttgaacttaactaatggtcttaaattcaaatcataaatacatagatataaaaacaatttaattagagggaaagctttcctcccatttatgtgtaaattcaaaatcactggttatactacaaataatttaatgttgattaattcatgtgttgggagtctttttattgtgtctatgcatatactaccataaaaaaattacttcttttattttattataattgtcgtataattgttattttaatttttcgatataacattaattatttgttttcacttatattttattataatattaatgatatgaatacaaaaacaaaaaaaaatgaattaaagatgataaaattaattttgtaaaattattactctttaatctatttattaattgttctttttacctgtatgaaacaagctaagattgataattagaatgggatggaaaaagtattaaacttgtatttaactaaggaattttgtattaggtgtccatcaataaaaaataaataaaaagaaaaatattagaatactactacctttatttaatattacttaacttntgtagacttataatttaatataatttaacactctaaacaaatttttttttacaatgatgaagntattaaagg

SEQ ID NO: 6264 - DNA, 816 bp, Glycine max
ggttacagttcaaatacatgcagttgagtcaacacgtgagttgcaacaacatgtggctggttctctagctctgcaaattgttaacagctcttggttgcagtgtaccctggcagcagctacatggtatatgattggaatggcaattacagaacttgtggccataattggaaatagaaataggtagaagtatatattaggagctttaaatttttcaggcaaagatatatatatatatatatatatatatatatatatatatatatatatatatatatatatatatgtaataagctgtaaggtatataaagaaacacatgaatcacattcacagtagatgatgtataacaatttctccattaagaatgctatactttatcaattctctgactcagctttgaaacattaacccaaacttgttgggatttaaaatttaccatttttcttttctcttaaccatccaactcaccttacggtccaaagacactgaaaattctacttgatgtctcacagggcacttagcttaaatgacaacggaatattttgatgaacttgtatattcatttctttatcctagtattttggatattattactgtttgtttcacatacctttcaccgctatgcttgagtacaaataagcaagatgccattaaatctaaactttgcgaattgtgctagcaaagttggttggtttggttgctacgagtagtagcatctgattttaacttatcctgacaaccttaagcataacctatgagttgtatagtatatagtatctacctgcttcccgtccgcaaagaaaagagagaaaaatcat

SEQ ID NO: 6265 - DNA, 853 bp, Glycine max
  misc_feature (635)..(636): n is a, c, g, or t
  misc_feature (638)..(638): n is a, c, g, or t
  misc_feature (640)..(640): n is a, c, g, or t
cgttgtagcactaaaaggctaaaactgttgcggatcctattcggaaatgacagggacacagctattttttctttttgaaattttaagaatgttagccatacacaactatatattattggttaaaatttattaaaaattataaaatcataaaaaatatttataagatatagcagttacaaaatttaaattttctgataaatttcaactaataaagtgtttttcaaggagacttgactgtaaatagaaaaaaattgataagcttaattagtacaattaaaactttgaaggattaaaatcgcataattagttaatttccatgttgagagattaaaaatgtaactaaacctaataagtattttcctctagtaacaaaaaagggccaaataagtattagaaatgcagaggacttttttttttatcataagttaggaagagtaactacttaaaaaaatcagttacaaaaagaaaatatcacgaccaattttctttataaaaaaaattatccaagcccaccttataaattataatacattcttaaaaaataatatacaaaaaagagaaaaatataataaaaaaaagaagataatccctatgtgttctttctgtctctctctctctctctctctctctctctnntntntctctctctctctctctctctctttcctttccttttctttcctttcctactatattttaactatgcaattcacacatccaaagtttggtttatgcttcatcgtggggacaactgagtaatactggaagagttagagctaaattgattacttgtggattaaagaatgacttcttttgagagaaagcctctgaatcctggaacaccctggggctg

SEQ ID NO: 6266 - DNA, 875 bp, Glycine max
  misc_feature (818)..(818): n is a, c, g, or t
aaaacattttaacctactatttctttatgtattgatttatagttgcaagaatttagctcacaataattatttttaaacctaggacttttaattatataaactgaatatattgaattagtctcttatagtgtggttggttgattcactataagtttaatctttacagtgtaagtttgttcaaatttataataaatgagaaatactttaaaattaatcagtttgaattatatgaaattaaaaaggggaaatttagttaagaagaagagtatctgttaagcgaagtaaagtatttattcattgaacaatgagtaattaaattaacttattttataaaaattctaaaataaaactaagtgctagcttaatatttgtattaagaaaaattataaatattgtgtattctccaatcatctatcagcagaggtttttaacatatatttagtctgtttgtgccacaacactttgaggtggggtgggttgtaccctccggtatcataagaccaaatgtctacctctaacccatgactcagtgacccatcgattgagtcccaacacgtcgatgactcaaatcacattctagtatcgttactacgtacccaactatccaatttgttattccctaggtcacagaacatggtcaaatcatatatcaccttcgaaaatcacgatgatagattgatatcaaacacaagtataaaaaaactcatgcttgtcctataggtgaggcaaattacacattctaatgttctgggtttggttgtctctagactttctgagaaagcctattccgaaacatatatttactttttatatgtgtngatatttattttaaatcagaatcaacatcaagtcacgaatcatcctctttatgaatt

SEQ ID NO: 6267 - DNA, 403 bp, Glycine max
accttctccccgtccacgctgaagcagagcttggagtggtcgtggtagccgcaatcgatctgaatctcacgcgctttacctccgaacgtggcgcgcgtggtgtacagcctgtcggcaaagacgtgttctttttttaggaggaggagttgcggcgtgtttgggtggcgcgccttggactttgaaaacgcgtctctggcggcgtctccgatgaggagggtcatgtggttgtggactactagggcgacgtagaagccggagaggggttcgggggtggcgccgaatttggctctggagaggttccagaagaggtgggtgttgggggcgagttttttggaaccgtgttttttccagaagaggaagggtcttatgtggaggtggaaggagagggtggtggaggggggag

SEQ ID NO: 6268 - DNA, 718 bp, Glycine max
atatgatattttaaattttcatctaaatatatatgtgataaatttattaatcttaataataattattttaaaatttatactcaacataatttttaattaattgcataaaaattaaacttcaaaataaaacctcttaacactatcaaacttaatgttattctaacttaacaagtgagtttgtttttttttaaaatcatatatattttttattataaataattatgtttgagtcaaatataattcttataaatggtaaaattatttttttaagtattcaaaaaaaatattatttataataatcttattcagtttaaacaatattttctcttattaaaaatattggttgtcgctaaaaacaacttaggggatgcataataaatgttctcggaaatgagccatctgaaaacaagtttgtactaactactttgcacacaactgttcgaatgggacggcaggcctagggttttaattgatgactaacagccacgtttgctaattattagttaaacccaaaggcttttgtccttcctacattggggtcactagacatgttatttatactttaaaatataaaacacacgaatctttcctagatttgaggccactcttgatgatagagacctagtacatgaaccccatgtaggataaaaataccttcgtattctaaaaccaatatattattgcaagtcttattctgctgctccatgtatggacagac

SEQ ID NO: 6269 - DNA, 738 bp, Glycine max
tgaaccctaattgactccgacgacttcgaatcaaacacgacgtcaatatccggcatcaaatccgtcaacgcgtcatgcaaatcgagaatcttgaacagcttctccggcgacctacggcttatgctaattgcttccgcgaagttgaagagctgaatcgcgggacctttcaccgtctccatgaagcaggcgtcgtcgatggaagttccgacaccgtcgaagatttgctcgcagagcttcttctcgctggcgaagagcgttctgacgcagaccttggcggcgcgtatccagcgtctgattttgttctcgagctgctcccactcgagacgctgaacatctccgatgctgagtttttcgatttggagtttgcgaaagctcgcatcgacggaggattttctgacgctgccgtagacttggatgcactcgcggaggtagccggaggagaccatgcgctcggcgatgcagcggaggtcgtagacggcgtcggaggggataagatcgatctcgcggatgctgcttgtggaacggtaactgctgctgttaacggagttaacagaagagcgaacagaggaagcagcgccgtcactgttgaaacggaaaagaggagtagagatggtgttatggttggagtcggattcttcttctgttgtttcttcgttggtgagagggtgttttggggaagaggtggtggaaagagagtctagggtttgggaagggttcgtcttcggaggaggggtcgaa

SEQ ID NO: 6270 - DNA, 886 bp, Glycine max
agcttgcattgcctgcaggcatgaaaaaagttttaaacgcaacttctagttgaataaacggtgcataatcaatcaagagtcatcaattccaattacataaaggagataataaatcagaaacctaatgtttcttagtaacatcacaggaccatagaatataaaaaagcattgacatatgacatatttgatgtgttatacactaccgttttaccaaagtgagcgtcatggaggattaattcccagtcatctccgcattcaatgagaccggtaacgttgggatcattgatggaaacacgataggagtggtggtagattggagatccagttgaaaaagaccaaatgaccctcgcagaaacactgtccaccaaatacatagtgccatcgagggcagcaacaagtgccgtggccggtttaaccgaggaggggggtagagagggaagagagagttgttgggattctgaggcgaaaaaaaagagacgaattagggataagagaaagattgaaacacgacaacacttcatttgccttgtttggtaacatcaaaacacttccattcgctgtgttttatgcaatgccatgttctgttgggatcgcccacccctcgttttccgtcaaactctatacagttccatttatttcaaggtccaatatataataatgtcagtgtgatcattttaaattagaaaatgatcacaaacctaagaataaagggcatgaagcccttatttcacaagactgaaaataatgcaacgaaataaccaaatacttatacaacacatagaactagagaatgaccattcagttccttatcatttaaataattatctttcttttcaatttctcataaaaatagggaaaggtaaaaactttttgaatagcttggcca

SEQ ID NO: 6271 - DNA, 889 bp, Glycine max
cagcttgcattgcctgcagcagccagcaggtaagtgtagccactagctacatagcttgcaggtaactgacaaaaataattctatttcaacaaaatatttaataataataatctcattttaatactactttgatccatcataagttgacaatgataagacgaggcagaagaatgtgaagctggaataaaatttgtcatacgtacgtgtgtagcagagaacgcgtatgaggtatgattcagtgcccattaatatccacttttttttttctttctttcaatggcggaacaatacagcaatttacacaacaaaactatggtgtcttttgctttccacgagaatttgatatcaaatactatattttaatgaacgtcgtgtaaccaaaacagagaaaacagagcactctttttaataaacaaaacacagcttcttttttttagtgaacaacaaatacagctttagttctcaattaattaataacttttccagactcttcatgatggaaggatggatgttgcgtgtgtcgtgctagtagtatactttctttcttttactgatcgacaagtttgctgcctttgacatccacaacaaacctgtatctcacgtcattcttctccaacctttcaaaggctttgttaatgtaatccatgtttaccatttcaatcatcgaactcagacccttctctttccagaactccaacatctcctctgtctccttcatgctcccaatgaagcttcccgttattgacttcctccctttacaccccaatacacatcattaaaatgtaattattggataagtataatgtactttttggtaagaactattggattaccattaatttattatatttaataaaactattgattatctttaaatgtaatattggat

SEQ ID NO: 6272 - DNA, 841 bp, Glycine max
agcttgcatgcctgcagactctgatggtctccatgggctattgcccattggggaccattccgtccgtaagaacaatatggtctccatggagtattaaattttgcacgtaaaggaacaagaatctctacttgtatgcctaacgctccctagctaagaacaatatctttcccttctttatattctcaacgtagtaagttccattcaattttgcatgcaaaaaacttgaagtacggtagatcctttcaaagacaacggataggaagattatagtaaaacaacattttaacattaatgaagttgaaagtgagagctcttaaacaatggtggcatgtcctagattaaattgattatccctcctccctttgatggaaagaaagaagcgaaaataatcataatcatgcggagaaagaaagttttctatcattcaacctatcattaagatgcttgcttataagcagcagcatataggatcatttatgcagattgatattgacagcctaactaaagaaaaacattcaaatcaataatgtcatgaccgcaacagacttgagacagtgataagagaaagcgaatttaattagcataatcaattcaagtgaaacgctcatatttagactaataagtaaatttaaaggaaaaagaaataaaatttatataaaaaaatagtatgatataagagagacaataacaataaaaataagcagcagcagaaagtggaactgctactgcctttgcagccatagccataacttaaggtctcggattcatccctatacataaaaatttctcttcaacctactcttaatttctctgccctccctttttatttatcataacaatg

SEQ ID NO: 6273 - DNA, 771 bp, Glycine max
cgccagcttgcatgcctgcagctggtaatttgaggagagggagagagagagagagatttttcagttgcaaatagtttttattcttaaactgatgttcatgattgctcagatataatagtaaagtgcgtattgaaaaagtttaattctctttggcaggtcgaaggtgtttctggtccagcgaaatgatttctactaggttctatgggatttatgcttgattcaaaaggtttgtagaggaaatgaccataataaatcagacgatgaggcaacgttaaaattcttacctgtttttttttcacctgggagattaaccaattgtgaggaaaaaatgaaaaatcaaattggagtttactgtcatgttattaaatatcatgcttttgttgtacagctccaggagcttgaacttttaactctgttttattattgttagcatattttgatgaaatctgatccacctacaatgaaaataaaatttcatgcagtttgttttaatcagtagagaacctggatccatgactatatctctatccatgactacactagaatcaacaatataaatgatttattataaatcttaagtatttgtttttataaaatttaattataatatgtgatcaaagtatcaattcactatatgctcaatggaatttaattcagtactattttgttatgtatctagtgaatcactcgtgcatctttgattcgtagtatgcatcgtgagctttgcctacattcttttcaatccaccaatccattattttttttaaaaaa

SEQ ID NO: 6274 - DNA, 874 bp, Glycine max
agcttgcatgcctgcagagttttatcccatagatgttttattatagatttcttagaaactcttaggattatgagacgccaatccaatgaaaatgaagggtagactcagctctacagcttgatggaggtattgctggccagtatcaaacaatatataaaatgaagacatcttcaaaatcaataggacaactatataagcctctatcggtcatgaaggaatgtaatcactgtcaaatggtctgcaacaagtttagttgtaacttttttgtcctcaagttatgtcaagctggtaaaaagtgtaaacaggatagctttatctggtgttaaacaggatagtattttgtcacaatgctaggtagcttgacgtgtttacttatgctacttaattatgattgtgaaatcagaagcggtgcataccaagaggcattatctttcattgcactgaaatgcattcacacagagctcgaatatattatcttccgaagaacttcctcctaactttattccgttatcaacatatctcaattcataatagtcgattaaattttaaccaaactaatcatacaaacttacaaatacaaacttttaagcttgcttgtttatcaaccttcaaacctagatgactatcatttttacaatttcttggggttggcaatttcttgatagctttgactttttagtccaaactaaaattagaaaacaaaagaaaaagtaaaaagttcctttaaatcataaatcttcttggggtctcttttgtttgaaatatagaagaaaaaaaatacaagatttcacaaaccccgcctaatttaaactagttgaagtcaaatttagtcagacactacatttgtctctattccatttgctaattacacttc

SEQ ID NO: 6275 - DNA, 837 bp, Glycine max
aggaacttcatctgggggcatgatgagcaatcctggaaagtctcattcataattgaaagagtaccctgtgactatgtaaaggcaagtaagaaaggggacttgggattaaaaacctatccctcatcaaccagttttgtgcaatgaagatgtgatggaggattatgggtggaagtgctgaaagggatgtatggtagggagtagggacttagatttcctaacttcttttatagtcaaacaaacatattccatgatttgtgttaaatttaaggactacattgttgaatggtctgagtttcaaattacattattgaagtgcttgagtgagattcactcagctgatcttatatatatatatatatatatatatatatatatatatatatatatatatatatatatataagtggagtctgaaacagaagtacaaatcaagagaaaaaggctacagcccatgacacctaactcagagatagatacaacaaaagttagctttataaagctgtacaacaaataataaaacaactattctaacatgggagttactactcttgtggtttttcattgttatttctgtttcttgttttgggcctctggttcccctttctgaaacaaaaaaattgttaatagtcgaatatatgagccctattattagcatttagaaatggggtattttggtttactttgtttatttaatctttggcctcctctgcatatgatatttttgtcagattaaaattgggcgttgtcttgaattctttcagagagcagaaacgtcgagaccaagaatgtggacaaacaaagtctcttgtacaagatctttgaagtatgctataattt

SEQ ID NO: 6276 - DNA, 839 bp, Glycine max
aaactaaaggtatatgagatgacatatattgttaactttgactatcattgagtgtaaaaggattgttattaacatactgttaatatatatatatatatattataaccaatatattgttattgaatttcttaaatttaataaggttgataaaagcattgacaagaccaatgtgccatgctccatgcttgccatgaatcatttcattcaatcatctctttgtttaagatggaaaatccttcaaacccaaaaagcattttaagaagaattaacatttatcttacttcaaagaaacaagtgtcggttcgaacctacaagatgtagattctatcttacttcactcatgcaatcatctttttatttaagacagaaaaaaccttcaaacgcaaaaaaagtgtatattttaagaactaacatatattttacttcaaagagaagagtgtaagttcaaacctacgactaattagatagagattttgtcttcctccactcaaccaactccttcgtctttcatgcatctatttaatccacctctcaaatcgaattgaccagacaaaattggcttcgtttctcgtacacttgtgcagtccatgaatgcagtcttctacctcagcctcactcacctattccagtttgcaagttaacaatatctctccatggcaacaatcaataatgttgaaagtcgaatggatttgaactaacatgatgacaaatagttaatgagtcttacaatcaaccatagtgcgttcttatttaataaagatttctttctctcttgaacataattatatcatgctcctaaacacatgagaggatatccaaagtttatacgaatactttta

SEQ ID NO: 6277 - DNA, 796 bp, Glycine max
atcaaactctttaaatttgaaattgacaattcctgcattgaattttacaaaatcataaattagacatatataagtagctactctctacaaaaagaaaataattagatcaacattatcaccacaataattttaaatcaaacttcaacttgaaattaacagtgacgatgtaaacaaaatacaggatagtattattaatatatactataaactcatttcacataaaagtgatcaaactaatcaagtcaagtccctctgtctagacttctaggagctaccacaagatacatgcattaacccatcataataaaaggaggcataattaattatgccagcaccaatcagtaagccaaataaaaaaatgaaaaagactgtgtcagacaagatacctctttcgtgtaaaatatctgctgagttagattcaaactctaatgccatagtcaaatcttcaatagcctgagatatcaggaaacagttgtcaatgtcacgttatgaattgttatttgtgcaagaaaatcatatgcaatcaaaagtgactcaagtgaggcatcatgagtcactgaaaatttcatatttcaatcactttttttcaatgaacatataataagataacagtgcaataacatgaaactacgtaactcttgactgccacattagttctgtttaacaataaaataattaaccccaagtgttaatgcccaaagccaaaccatatcaagtttcacgcccttagttaaaataagtcaattcaaacataagtaaaaaccaaatttccagaccttttttcatttttctgtac

SEQ ID NO: 6278 - DNA, 857 bp, Glycine max
ataattaatgaagaaaattgctataaatgtatatgtattatatattgttatgataattttttaatgaaatactaatttgtttcgtaattttattttatcttcttttcttgtgtacaaatgctttcctttcttatgcatcttaattacgtatagttcaatagcctagaacatatatagtctagcagctcaagattcagaaagaaacatgcagattgcagagaaatcagaatatgtttccacttccagccacatatgcatcaatcatcatgaaataaacatatcatcaccataaaatataaccactgattataattttccaaccactgctaaacaaattaaaaaaataaaaataaaaaataaatattcagaaagtgaactcgttcaatgtcgctaatgagtaatggcattactgttacattagatgtttactctttactaaacagtattttgttctgaatgaacgatctttcatattaggaagagagtaatacgagctcattttacatcatcaaaatggtatattagatcatggaaaccgattctatcaataatatgcaaaatcaaaccatgtctttctatgcaatgcgatagttttagagcaggctactccatagttagtagttgccattgataattacaaattacaatcataatgtaaaatctgtttgtatttggttaccagataattagtagttttagtacatgctactccatagttagtagttgccatcaataatctgtttttagttgccatagttagtagattgctagcatttttcctcaattttttatatgggtcgtgaaaaatttcggtgtccaaatattcaaagatagggaatgattgcagcatgatacca

SEQ ID NO: 6279 - DNA, 885 bp, Glycine max
agcttgccctgcctgcagaagaagcttgctcagccagccgctacaattttgctcttacatgttttgtatggattggcatgctgtacgaatatgggaacaattttttggtaacgtgtttgtgtgttgaaacaccattttaagatagatatatttttgtttatttgtaacatggtactaatataatggtaatattttttttatttcccacatatctcgtctttccacttaaataatttgttcaatgacgaaaataatttgatcgatctattattcaacactaaatataaacattttttttaaataaagattcaaatcttattcatcacgttctgaaatattaatcaatttcattaaacctaagtaatatgacaatattataatttaatcttcttataatataatatataataatgataacaacaatttacttatatagaataaagctttaatataattttgattcttgttcaatttgtaattttttgttttacaatagagaaatttcatatttggtatttttattttagaaaatttaaaattttgatcaaatttttatttttttacattttgtttcttttattttaattcaattaaacattggatttaacctattcatttaaggtatgattaataaatgatttaattaattaaaatacaaaataaatgtatgaaaaatggagaattgaaccaaaattacagatcttttcttcatgggtaatgattaaagagtgcatgtaaagataaatattacaaaaaggagattgattgaaatgtgatttaaaattttttgcaagcctttttttcaaacaaaactattgtgtgaagagttcaagcagaaaacaagggttgttttcatagataaatgaagtgaaaagatacttccac

SEQ ID NO: 6280 - DNA, 1032 bp, Glycine max
aaagcaggagtacatcaatacagcaaagccctttaattgtctgcctttaccaaagaaatctcttgaagttggccattgcacttctgtgaagggtttgagtgatagaataccttttgggacccgaaagatgatgaattatgcctaagcagggtgaagctagaggaaactctggtggagtcctgcagcgatactgacgtgtaaatcattcatatgacttgggtataagggcgaaaaagtaatcgaaccatttagtaattggttccctccaaagtttcccttaggatagttggagcttgctgacgagttctatcaggtaaagccaatgattgaaggcattgggagcgtaatgcccttgacctattctcaaattttaaataggtaggacggcgtgtttgctctagtgagccgcgccacggaatcatgaactccaagtgggccatttttggtaaacagaactgctaatgcaggacaaactggaagttgggttacggtgcccaactgtgtgctaacctagaccccacaaaggatgttggtcgattaagacaacaggaagatacacctctaaagacaaaacttgttaaaattacacattgtactccaacaagatgcataatcagcagcctaaatacagcgaatgtcaagatgttaccctctttgatcccaccaaaaccgttttaaccagtcaaccaaaatttgcttccaattcccaaaatgcctatatattagcatttttcaatgcacggtcaagagttcacttgtccaatggtgtaggtcagtcaattaatggaaacatggcctcactagttctgctttaggctttaatatccagaatgtatggtttggtaacattgtttagtactctctgatcctggttggtcttgtgaatgtttcttgataacaggtgatgttgttgtccacatcttccttccctcacagagagctttctacaatttggaagaattttatggtaatgcaacaccagtagagctgccttttgaaatcaaccaccaccatttcgcatttgatggccta

SEQ ID NO: 6281 - DNA, 835 bp, Glycine max
accaaatgttgcatttcataaatttcatattgataagctgatagcaatctaaccccaaggataaacagaaagcatgggttagaggttgacacaactatgaaattatgcccaactgcccccaaactaatacccacattgtctggagaccaagatgtgcaaataggagaggacaaagggataccttcagaatgagcagccttagtgggcaaacaaagcttaacagtagatttgtggatctggacaagcaaaccatcagtcacaaggccgcatgccaaagtacagacattaggttggaaaccgactgaatcagtcacatcagtaaaacttaagcctactgacaatattctggtttcctcaagaaatgatagaaccagaaaagaatggtgtgaatccgtaactctcattcggacagtccaagtaccacttaccccttgatatatagaagcagtcctatgtagattttccacattaataccatttcgaataatccttaatgacccctctggtgccacaccacagcaagcaaacatttgatcttgcttctcatcatgataatctacaacttccatatccaagattggtgcaatgttttgaatagggtttgtatagcacagccttccatcttccaatttcaggaccataccatcccccatttccacaagggcagctagatatccactttcaacccacaaaagtgctttacagggtagacctttatagagacactcagacagattaactttagggccttcagaatcaaaaagaacttcaatcataaaaaattctccagtatctacacagaaaatcattttaggatctctattatttttcaggt

SEQ ID NO: 6282 - DNA, 804 bp, Glycine max
  misc_feature (709)..(709): n is a, c, g, or t
  misc_feature (712)..(712): n is a, c, g, or t
aatcgacctgcagtttgcatctctaaatagaggtagaaggaatcaaaggaggaaaagtttcttgtggcatgtgatgtgttggagtctttggaattggtgtaatagaattgcttttttataagattcttttgttgctggggaattgttatccttattaaagaagatatcatggcaatggttcttatataagaagaaataaagcactggtttatttttctcctcatggtctttaaccctcttttgtatctagatctttagatttgggatctttttgagttgcaattgatttaggcacacacttactgtcttgatctctttaggaggtgttttagtatatgttagttttttggcttgtacctccttacctgtacaccttgtatagtaactatattaatatatatatatatatatatatatatatatatatatctttgcctttcagaaaacaaatatcatagtctacttatatttctaaaacacaagtttcgaatataaaacatcacagatcaagtggagactaagtataaatagaaaactagaaaaaaaaaatataaatacaaaagattccttatacagatacttaaagaaaatattaaacttaaatgttagaaaaaataacttttatttttctatttcacttattcctcctcgttttctttgtatcatgctgatatatatatatatatatatatatatatatatatataanggnattttatttattcaatacgattcatacgatttaactttattgatttcattagtgatccattgatataatacttatattaagttgattaacta

SEQ ID NO: 6283 - DNA, 824 bp, Glycine max
agttttatctctctcgggttacataaattgccgtagctaaattttgctttgagcaagtacatgaaaggtagatagcttctcatcaagctctttaactgatttttggcatttcagtttcaacagtattcctttgattttgatggcaaaggtatctttactccctgaaccagtggagcagagctgttaacctctgagatcccaatatttttgcatcattttttgcatgattgcttctcaaacggtgaatagtctccatatttttatagttgattgttgacgcagacagggaaagattgtttgtatgacttaaaatatttgattagggattactctacaatagttttgtctatgtttctcccctttttctagaatgttttccccccaaatttagattcaatgatgttacaaatgttctacgtttacgaccggccaaaataatggtatttcgaatgctgtttcggtttgttttattttggggttaggcgggagttgttttaccacaaacaaaataatttatccgtagtaaaaatttcaacccaataaagaaaacgatgtgctaaagaaaatggtaataggtgcattcatttggtttgtcgggtctcttgcatagttagattttctgggtctcctccatattgtttgattgaagggaagggatttaatgaattttctttattggttcaaaaatttggtgagaaaaaaatgaaaggggttagatttttttcatcccattttatttctcaaattttggagatttagaggatggggattttatactaattgactaaattatttttaacttaatgattctatttattttcaag

SEQ ID NO: 6284 - DNA, 854 bp, Glycine max
agagtcgacctgcagcggcaaagaaagtaaaaagaaaaaaaaaaaaaaataaaacagtgggtccgtgcgcgttaaaaagagaatgtgtaaaacaataaaatattttgaaaaaattgtcatgtgaacacctgataatcaaattagatgccggatggttttaatatatctattagttacttgtaacgaattatatattagtacttattttctggatcggattgtattccagtccttttaaccgaatttctctggattggtctctataataatcagaattttaaagtattgatatacgatccaatcaccttcaaatatttagatgcaccaaaaaagtggcataaacataatcatgcaccgagacccattagatataggtaatattttaatacgttccgacccataactattaaagggatacgcgcagcaaacaacgataaatagtgtcctcaaactaaaggttaaacatttgagcattttggattaagtggtctccattcctccaaggaagtcttttatgaaagactaccggatttattttcataatttcatttcaatgatatttaactaatggattcacaaacgatattcaattcaggtatatggccagaatcgacaagggtatgggccctgttccatgccgttggaaaggcacgtgtatgaaatcctactacttctattcatctaactgtaacaggtgaaaaaacgcaccacacacagccctgaatcaagcttaattatataatccataatgtatgatgattttgattttgattaggaagataattggagcaagacattacccccgaccctcaaggagacagtgagtatgagacaccaagggataaaaatgggca

SEQ ID NO: 6285 - DNA, 900 bp, Glycine max
tgttttcgccaagcttgccatgcctgcagctatatgtgtacttgtagttgtaggaagtaatggttgaattatagtattggtttggagatgggaagattggaagagaagaggaggaaatttgttttgctatgtggtggatttccaaaatatggtgggttggattctgaattttaaattcaggaagtactagaaatgttccggataaggggagactgttattcaagggtgcagatatttttatacatgaaagtatgaaactcataatccaatactagacaaccagaattcttctgcccgaatgagttagtaacttgacagttgacatcattattgaatattgactcttggatatatgtgtactgagtactcaacactactgtgacttatctatccaacaaccaccctttaatattggaaaatttggcctacctctctatcaaaattttctaggctgtgtagacagttactcttttagttgtcttgactttttgaagccttctagttatttgtggcaagaatttaagtaaatgttttcatgctggctgcattaccattgctgattaggaaacacactcacatagttgtttaaactagtatggttctctttgcatattgcataatacattatatagaagaatcaaccataaaatatttccaggctaaagagattagaaatagctgtatgggaaatgtcttatatattcattcacttttactattcatccatcttgtaacttaatcgtcgtttttttgtcattttggttcactttttcatttgattttccttctatatgggggtaggtattatgcattattgcattatccttctgttgcacattaggctctatcccctgtccattgttatctccatacatgcctgggtgaagttgagttgcattc

SEQ ID NO: 6286 - DNA, 835 bp, Glycine max
tatatgtgtacttgtacttgtaggaagtaatagttgaattgtagtattggtttggagatggagaaggttggaagagaagaggaggaaatttgttttgctatgttgtggatttccaaaatatggtgggttggattctgaattttaaattcaggaagtactagaaatgtcccagataaggggagactgttattcaagggtgtagatatctatatatatgaaactcataatccaatactagacaaccagaattcttctgccagaatgagttagtaacttgacagttgacatcattattgaatattgactcttggatatgtgagtactgagtactcaacactactgcgacttatctatccaacaaccaccctttaatattggaaaatttggccaacctctatcaagtttttctaggctgtgtagagttactcttttagttttttttgaagccttcttgttatttgcgggaagaatgtaagtaaatgttatcattctgactgcattaccattgctgattatgaaacacagttgtttaaactggtatggttctctttgcatattgcataatacattataatagcagaatcaatcataacatatttccaggctagagataagaaatagttgtatgggaaatgtcttgcatcttcattcacttttactattaatccttgtttttttgtgtcattttggttcgctttttcattgattttccttctatagggtgtttgatattatgcattattgcattatccttctgttgcacattaggctcaatccgctatacattgttatcttcatacagtgctggatgagttgagttgcatacatataaaaa

SEQ ID NO: 6287 - DNA, 792 bp, Glycine max
atcaaaaagacgtgtggtagtatcagtggttatcttcatattgttcttaaaaaattgttattgccattgaatgatcacaatgcggcaaaccattttgccttttggtagagaaaagtcatcttcatcttttagggtggaatattcatcttcatcttcatgcagaaaatagtcatcctgtgattaacaagacaaatagctatagttgggaatttgtttcggaaccaaaatgagattggcagtccccaggtctcgcactcaaaccactctggaatcttatctcctatgggctcctggcaaataagagggtgtttccagcctcatgcagttcctgttagtaacaaatgattcatcaagtttagcaacatttaatacactatgaatgaccaaatcaaatagataagaaacaatgcctgactcaggaacttgcttctacgagagaaagtcaaggataggcaaccttctgcataaaaatatttaaagtttggaggattccctctaatttcttgaagacaccttcagccattcaaattaaggcaaattaaaaaacagaagtctttaatgtattctggaataactgtgaatttattccatgataggtctgattccttcatattagcaaacgatgggagacctactggaaaaaactcacctgaaaggttgcagttttggagacgaagatgttgaatgtttgaacacatggttctggcaaatgtcactatagggcattgccaccctctcaatcctaaactgtaatcttatccagggaatgatctacatggtggtttttggggg

SEQ ID NO: 6288 - DNA, 859 bp, Glycine max
aaacatgtagaccagttaacttgttaaccagccttatggttacaatattcagttttctgtttatgtgtgaggtggtaacttcaaagaatttgacattctaatggtaagatgcagttcaagatcctttatgctctgccaatgtagactttgatttaatcaccaatcacttaccagaaaattaacattcttgtggttagctgttgcctgagttcctttatactttgccaataaacactttattttaatgactattcataaaagcatcacattgtaatgctggattatgttattttgaaaaaaaatagtaaaaggaaatttgaagtcttctttattttgatttagaaggggaagaaataaaaaaagattaactacgagaactcacaaacagtttcatagttcctgccttatcaacaatgaaactaaagatcacaccagtaataggcgtcttctaagttcgatccccattcagacataaactcagaaatttggttcatttcgttcggcacaatggtaggattccattgttttttgtactagagatctaatttatgataacagttcagacatattagtaaccaaagttgcattgtggcgcagaatgaagaagagcttgagcttctaaacttttgaacttgtttttttgggttacaaaggaagtgtatgacctggaatgagatgcataaatttttggtatcatcaaaatccggtaaagttgaggtaatacattgatgatatatcattatatggtttaagtgtatgtctctcaagtctcaactattagttgtctgacacttctctcaagggaaaataatactaaagtactttgcatgtacttttgacaacacatacacaaacacaa

SEQ ID NO: 6289 - DNA, 843 bp, Glycine max
aagctttgtatatagatttaataaaatttggagcaatgccatccactttcatcatgcatgtcccagatccagggccaagaccaggactcagacccaaattgctcctgaaatctgtcaaacaaactcttcaaatgcaaatccattgtctccccaattcctcagattctttttctttctatgctcgcaattcactccagtgaaactaaatctgtccgcttcaacacttgaaattatgcaataactctgatctcacaaattctcataactctactccacttcaacaacccaaattcccgctatgaagtagcactagacttaacaaagcaaaatgccaaaacgcatttgggtacatgagtacagcttatgaaatcagcacccactcaactttgttcatgcaacagaaaacagataataaaacaaaaactgatcggaccataagatcaattgtttcaaattttcaatcagaaagcaaaagaaaaaaagttcaaagcttttggttcgtaccagcccgcaaaacagtgaccgagttgtgctccaaagacccaattccgaaacgtttcattttcggacataaatggaattgacgggtaaagtcatatcatgcgggcattcgtatttgtgacctgtgagctcggaattcccatcaggaaattgaagccattgaagtaatcaacgatcagaaaacgatttgctaaaatataatcaacggtcaaaaacttattgcaagagttttcttttccttttatgaattgaatttgcaagagtttatttacgaactattttaacttattgtaccacagatattcatgtaagtattcgaaaaaccatgtaaaagaacttaca

SEQ ID NO: 6290 - DNA, 850 bp, Glycine max
  misc_feature (800)..(800): n is a, c, g, or t
  misc_feature (821)..(821): n is a, c, g, or t
gaatactagtggcacatattttaagcagctccatttgagaaatagcctagcaaggctatggagagactgtatccaactgggtaactcttgtaaacgccctgacaaatacaagcgttgaagaaacggagggggtgaacaaaggaatgctagatcaatgactttattctcaccctcagaagcaacagaaagggcatggagattggttaatttctcaatggacaaacagaaagcctttccatcttcctctctaagtttcaagattcctaaccttcttagttgacttagctcccctaactgccttgttatgattccacaatcttggtttgcctccacaaaacaaagtttttgtagtgacttcaaatttcctatttcagtgggggccttaaaaccatgcttggagtagaactgtggatagcctttgactttaaatttatacacgaggagatggcgaagcttttgaagctttagtatatctaaaggcaattctctgacacaagtcttcttaagatccagtgtttctagattatgcaacttccctattatgtaacctggaaccattgtcacctttgtgttccttaagcttagatatcttaaatgatatagatcaacaactgctactggaaacttattcaaaggtgcatcttgataatctaaaacacctagcagtttacaaccacctggaaacagtttgccaagagataaattttctccaacaccaaacattaagagagaacggagttgagagcctgacctatgttgctgccgatgatatggtaaatgtgccgtgcaccgaaagccgncgaatcttttcaggccatgcncatgctttgttctttgacatggatacaaa

SEQ ID NO: 6291 - DNA, 866 bp, Glycine max
aatgtaaacagaaatgtttttggtccaaccataccttgccatatggagtaaacaaaaatcttaaagatatcaaattaaaattgcaggcacttgtctctaagcatacctcttagatattccaggcaaatgaagtgcttcagtagcatagcccattcctagcataaattgtgctaaatcatcatggtgttctcttccaagtctacttgccctgtttcaaaaagtataatgtgagatatacagacatatctgaattaataagcaatgattatggaaaaagagggaaaaccagggagagaaagtaatcacaataccattttactgcactaacagcatcaccataagcagcaagacatcggcaacgaataccaggatgactcaaggataaggcatgagcacacatgtacctaccacaacccaggtatgtatgaataacatcattcttgaagttgaaaacagtatctaatacaaatgaataacctcaaatttgacatccatatataaattaagacatgcccatattaactttttatgggtgtatgcccatgttaattatgacacttaaaagttagcctgaggccagagctaagactaagaaaaagtcaaccctcaactgaatcagctggatctagtcatccactaaacacatttaaaactgaatgaacacatctctttaataagtgcaacttcaactttctcccaaatacattttagtcctgatcacatcatttcttgtatgtcttcccattcaacacaacatttgctaccaagtacataacattacaacaaaacgttgacctctcaagttttgattaaaactattataagaccttcctgaagtgtaggcatacaaggggggggattcatag

SEQ ID NO: 6292 - DNA, 841 bp, Glycine max
caggctcaaggttacaagtagagttgcaaagccaccattctcctagcctcatagtttgcatctcttgcacaagatggtcaaagtgcaacttatcatggccacgccatggaaagttctctgtgtccatcataggcatatttggggagagttgaatctcttgtcttctgatgggaaccccttcaatgccaaaaaagaaattaaaaacaatgaaacctcccattagtagttagtatacaaatacaattattaatttctcaaaaaatttgacataaaaagtactataatgcgtaacaagaatatgtaaatattattattattaccatatgaatctataaccccatcatgaattagctttgggatgaaatcacacatggccaatgaagttgctgatgccggccatagaagagcccctttgattcccaaattgtggccaactttcaaagcccaagtcatgctcaatgtgacaaccaaacaagtgatcttattgttgacatctaaagcattgacatcatgtatgagcttgggaagcatagaaggcatgttggttttgattgagagaacaactttcttctggtcacttctatcatcttcagggcttaagccatcagggagtgtcacaaactttatccctgatgtcttgaggttgtctaggccagaaccagaaccagtgttgttgttcaaccttttgtggctgaactctgtgttcagaaaagtgatattgcaaccatgtttgactagaatctgagacaagtggataaaggggattcacatggccaagaactggatatggtataagaaagaagtgagggatggtcattggggggggctgaaaaaactgact

SEQ ID NO: 6293 - DNA, 821 bp, Glycine max
aaacttgtgtacattgtatctggctatctggctgaggcttatattattggtttttcacgcatcctttacataacacatgtggtttattgtattgccgtattttatcctgtaataggattatacattttcttgttgtcttatttattcttcattctctgtcgttctcaattagctgtttgtgcactttcttatggttagacactcctcttttattcttctatttgtgcatgttactacttgattctaaaatagcatccctttgtgctggaatatttggtttcaagttgagtccttaaaagaaaaaaaaatgcaagtcagctattactactagagctgtggcctgtgattttgttatttctgaaatgtctgcatttattaaactctagagatttccccttgccaaaataattgcaatagaatggatagattgtcatacattaaaagaaataattttgtttgttcactttgttgttagtatctttcccttctgtggcataataaagttattttaatttaaattatctgtttttatgagaattacttgtttttcagagtgaaaatattggtgacatgcatgttagctaacattttttaaaccaaactagatattgaactggcaagatctctaggtcacaattgattagttaaactggttaaattagtggttgaaccatggttgaactggataatatgatgacgattctgactagagacacaactgtttcatgattcaatctgttcaaccatgcattttagctgtatttttaaatccttggagtctgtatcaaaatgtgctgacttctttacatttaaacagtggt

SEQ ID NO: 6294 - DNA, 817 bp, Glycine max
tcacaagaaatagtaactattccagcaaaagcatcaagataacgcctgccattctcatcaaatagatgttgcatcatgccctctacaatgttaagctatataaacaaaaaaaaattgttaaaaattacaaaaatatgtggcactcttttcatatttaataaattttatttataattttgtaattctcaataaattttaatggagtgtcagacaaaatatattaaagaagatgtgagctataactcctccttacttatcggtatcgatgatgggattaacatatgacagttcttgtggagacccattttcaaataacgtaactatttttacttcatttctttgactcaattctcagagaaaataaaactaagaaaacatagagaaaaggttagcaacttatcataatatagtaactgataaaagattgattaatttgggagactcacaagtttttgatagaagtggaacaaggaaggaccaaggaactttttccgtttggcaaaaacttcatcagccaaaggtcctttgtatggtcgtggcttgtaatcaaatggtggaagctgaagcctccgagcaatatcatgatcacttgttgcagttgaagtgctcaaacaagaagaagaaccaaaaagcctcttacaaacaccaatgcttctcttcaccatcgccatgtctaaaccaccttttactaaacactacctatacctttatctcaaactcgatcatccattttgtaatgctttgcatgccatgtctcacgaataattgacatggaatcttgttaatttggattatctaacattcaaatatattatgc

SEQ ID NO: 6295 - DNA, 849 bp, Glycine max
acactggcatttaacccctccatcatcctgtccatgaagcaatggcaatttatgtcacagttcagtttccattatagatttacaaaccatgcagagtaaagtgtcaacatttcaagaacttagtaattactaaccgaacaagcagaatatgcatgtccattcctagcttcatgccaacaacctccattgtttatcttgcaacgcccaggtccactagctgcaaacccagaagacactagttgaataaaaactatgaatacataaaaaaaaaaggaaggttaaattattctctagtctatattataggtacttataattttattaaattttaaaccaggtccctataatgtaaagctaaaagcttccaacagtatcccaacatgtgtaaaaactaagtagtcaatcctggatagtagcgtggagcaaccacccccaaaaattatagcagatagtgggatggccgctattgtgaactctagaaaacaatattcatagtgaagaaccaagaagatataaaagaagaaaggggaacacgaagttttcatgtcttataaaaaagaggaacttaataggggggacatattacattttggcaaaaaagtggagaattaaagtgggaagaaagaagcattattaggggcagttaagtaaaacccttataataggaaaagcattagcgacaaatggggaacttaattgaaatggcttaaaagattaaaaaaataaaataaaggtaaaaacaaatagaatagggaaaaaagtgagcgaaaaggtgggcttaatcaaacaggcctaaaagattaaaacagtttaaaagaagtttaaaaaaaaatggaaaaagtaccgaca

SEQ ID NO: 6296 - DNA, 831 bp, Glycine max
atttagccaccgatttttttgatatattcgaggactttctagatttatctccttcactccctcttatcctctttttgtctcttctttcttcaggttcggacctttattattattattattattattattattattattattattattcgtttcttcggttcatctattatcttttggtttcctgaatccatttctttctacggttatcttatcttattggctaccatcttccctatcttcctcaactgggttctgcgtattgttttaagtttaggcttgtttcattttagtatttgattgctaattttatatttctgtattcatttgtttatttatttatttattactttgtttcattcacgattctagatgagctctaaggttagtgagggggttatttcctttatgttagatttaatccccttcccctttgtcatgctaatgtataaatggttgttgccttttttgtcctccatatgtccagattttcttctgtgaatttgaactgaattgaattcgcttggttgctgctggcttctgtgcttcctgtttaacttatttccagtggattattgttggcacaagttattggtctaattgaaatgaaagaatttgagtgaagaggagaattagactgtctgatctggctatggagaattcttataaggctaatggaaatggaccaactgagaatggatactctgttgcaaggcattcttatcaacccctccttgaagggggtcattaccttggctggacataagggtgttttatgtaagagtgtggcaagtgtgagcttgatgattcccctcctgggattcttaccctgaa

SEQ ID NO: 6297 - DNA, 854 bp, Glycine max
aagtaaaattctagttactacacgtattgattccattgctttcatgatgggaactgttgcctcttacaaattacaaagcctttctccggagaattcaatgtctctttttgtcaaatgggcctttaaaaacgaaggcgaagaggaaaaacatcctcatttgttaaatatcgggaaagaaattgtgaaaaattgcagaggggttccattggctgtgagaacattggggagttcactattttcaatgtttgaggcaaatgagtgggaatatgtgagagacaatgaaatttggaatttgtcacaaaaaaaagatgacattttacctgcacttaaattaagttatgatttcttgccttcctatttgaggcaatgttttgcattgttttccctttacccaaatgattatgaatttaatagtttcgaggtacatatgctttggggggcacttggtctccttgcatcaccaagaaagaatgagacaccggaaaatgttgtgaaacagtatctggatgaattactatcaagatctttccttcaagattttttcgatgctggcactttttatgaatttaaaattcatgatttggtgcatgatcttgctctgtttgttgcaaaagatgagtgtctacttgtaaagtcccacattcaaaatattcctgagaatattcggcatctgtcttttgctgaatacaattttcttggaaattcattcacctcaaatcggtagctgtgagaaccataatgtttcgaaatggtgcagaaggaggcagcgttgaagctttgctaaatacctgtgtgtcaaagttcaaatattgcgagttttggattaagggattcacatgcacactttgccacgt

SEQ ID NO: 6298 - DNA, 1164 bp, Glycine max
tcgccagcttgttgcctgcgaggaagacataacatgaataaacatgaaatttagaaagtcaactgtgattttagtaaaataagtagagcaaacagaaattgatcaacacctattgtgattccatatatctacttgagcaccagctgtggcaaaatgctcgccatcccactggtgatcagcacccctaaaaattaaagaaagcaaaacaaagttcagtaagcataaaaaacaaacaaaataacaagcttcaatatcttcctctgggataatttactccaaaacttaccaaaatgcattcttccaaacataaacacttgctggctgcacaaaagcaaaaatagtttataaaattgtgagttagtagtatacccactgaaattaaaaaaaaaaaaaagtaaaaaaatgccagcacaatatttcacctcaacagtgctcttagttgagtcatctgactccataagagtagtaataggaacactccagagtctgatactgagcacaaattccaggttacaacagaaaaattagctattgaaggctaaatatgggagctagatataaaaagggggaaattgaaaaggttgattcttacgtgcaatcagttccacatgacacaagaatgcgtccatctgtagatgctgtcaagcctcgtacagcacctcggtgaccaggaaactgacaaactgtccgtctatttttttcaaatataacaagcaacaatattagataaataagttgatgcataagcaaataaacaaccaatgtttatccatatatataattctgatgcattagaaataattttagcatataataactacaactcttcagaaagccaacataccatcaaccagagaaataataagaaaatctcaagtcatatttgatacagcaaactagggttcttcataactaataagacagaaattattacttcttttgagatacacttattatctatgatagtccctaaaatgtaaacagaaatgaaagaaagaagaggcagctctgctcaggcattgttaaattctatttcttttatttttccacttagaaattcaagacaatattaattattatctttacagatatgccctctaactaattctttaatactttacacttatcataaatgagagagaaataccagtgaaggtcatactt

SEQ ID NO: 6299 - DNA, 879 bp, Glycine max
aaatggaacccaaggataaacatttgtttgagtacaatttagatgcacttgtagaaaatgaaaggaaccatgcagagtttatatttgcaagttggggttgtgtccaagtccatgtaaaatatgaattcatgtattgagacggcaaagtagcatggaggatattcaattcacggattctcacagaaaaataaaatcagatgatgatctcaatagttcagaatctcaaaaccaacaattgctgaaacaacaatgtaactaattctcttgccttactgcttactggaaactgatttatcttttctattcacgtttagttttagacatttgactatgctttggtttcaataaaaatagattgggcatttgaatgtttttacacattcctctgaatctgcggttatttttccacattttactttatttcctgaaatctaaacttgaactgctcaaacctattgacacctttcaggctttcacagctgccatggatgttattggcaagaatatgacaaggaattaaatttcactttttatgtcatacttaatactgattattttggtatagcttaccctaaaatttttggtccaaattgcttcgagacagcctgtaactaataactagatccatctatctcgaagtaaatatacttaaaaaaacatttctgttgtgtctgaccaagtgtcatttgattttgaagcatttctttcatgcatttctgattatgaaatatgaagtgcaggcactcctttttggttgaaatgtctaagtgtgtgacacattttccacactgatacaagtgtgtcagacactctttattaagtgtttaactaaaaaaatatactgttagctcataaagttcatatatttttgcctgcact

SEQ ID NO: 6300 - DNA, 1075 bp, Glycine max
cgccagcttgcatgcctgcagattttgaactctctcttgatgccttggtaaatccctcaccctatgatggcgtcgcctgacatgtttctccatggaaatcaaggcttgtttgcttggtagtatttcaataggctaggtttattgttgatgttccttcgagatgtatttttttctatataaaaagaattgagatttgttttgaaagatgaagattgaagggagaagaagataagtgtaggtctgaaggatgactggaaaaagggttttaatgtttgatttatgtattttttatgtattttgacagtttttaatgggtagaaaatttaaatttaattttgaatcaaatattgatggtttttgagacatcataaatcatgttatctaatctttaaaatcatgttatctaatctttaatggaatctagtatttaacggagatgtcgtcgtttaattgataataggaatttaaaacaaaatttcaactactagagagcagctgcgaaaaaaattataagagacaaaatacaaaattaatatatatcaaagattaaaaatatatttaaacattaaattttcagcccaaaaaaaaaaatcaagttaattgtggtcactctatagctaaaattgaagaaaaaaacaatctttaaaaggcatccaccagagtattagttgttaattataaattcaagacatccaccgtaactattagttgctaattactaattacgaagttaaggcatccataatgtctcttccaagtcaaatatatgaagcaattacaaattacacgattctcaataagactagcaggaaaattaaaaggaaactaaaattattaaataataaactctctaataaaactaaaatgtttttgggtaagctcccacatatcacatgagtttatatctaggagactcttttcaccaaaattatcttgcattcccaaaaatcatatttttaggaaaattgtactaagaatgttatttcttggcatatatatgaaaaaatatttatagtgaaattaaaaaaagatttctcacattctcacgagaatgtgattttctcacattagcatg

SEQ ID NO: 6301 - DNA, 837 bp, Glycine max
ggagaagtcgctgaaggcctgcgacaaatcgaggaggtcctcctcagccggagaggatttcaccgatttgctgttccgaagcgcgagctcgccgagacggaggtcgacgacggagtcggtgaggttctccgagagacacgtggatttctcggtgaaggagcagcagctgctgctgttgtcgtcctggaagaaactggagcgtatcgtgcgcatggaccttccgatgtgacgctgcgttttggacgaaaccgaggagtggtactggtaactcctcgccaaggggaaacggctcgaattagagcgagattcctccagcgaaaccattctcgaacctttccacgcacacgaattgcagaagattagggtttagcgttttgtaatgttatttatttctcagttcagagtttcatagtggaaaaaagtgagtgaaggctgcgccaggttgaagacgacgaataataataataataaggagaaggagaataactgtttgatttttcttttttttatattcgtattactattatttttatttggctgtgagtgtgagtggtggagggatttggtatgcgggggcgggctataatcacaggacgttcagatttgtagtgtgacagtcggtggtgaaaaggtgggacccatttgaatcgacggtgagaaatgtgtcggaaggtgaacgtactgaggaacgagattgggataatatcatgtggggtcgtcggcgttgggcagaaccgtcgtcgttttgtgcgagcttttttagtgtctggatgaaatgacggaaatgtcctggtttggtgacatgggagctgtacgaaaagagtaaatacagttgtc

SEQ ID NO: 6302 - DNA, 867 bp, Glycine max
  misc_feature (827)..(828): n is a, c, g, or t
agcttgcatgcctgcagttgcaaatgaaactaacacctatgagataggtaagaaacttcaatttgctatagagagaaagggttaggggagggagcgattgatgtaagatttgcatttggtgttctattccctggtctgaggctgcccgtcttatgacttactcatgaacttcttggatctcatttcagtgacagaattatgtgaatatgctgcaaatgttgacattcccattgcaagggaatcaattcgagctgttgggaagatagcattgcagcagtatgatgtcaatgctattgttgatcgacttctccagtttcttgagatggaaaaggactatgttacttctgaagctctggtaaaaatgacaagtgcctgctagctaccctgaaatttgtgcttaagagtagtattgctttgttttatattatatgcaaacatgtgttgaaagtaaggcattttgatttgacttagatatggtatggtagactaatgcgaagtttgaaagttcatttgttcaggtgcttgtgaaagatctgctaagaaaatatccacaatggagtcaggattgtattgctgttgttggaaatatcagtagtaaaaatgtccaagaacccaaggctaaggcagctcttatatggatgttgggggaatattctcaagacatgcatgatgctccatatgtcttggagagtttagttgaaaactgggatgaggagcattctgctgaggtaattacataactttttatgctttacagtcgtgcaatttccacatttgagatttagattttcatatgatgccagttatgcccagcatcatggacatgnnatctagtattatcagcttggcatgtgaattatatcttga

SEQ ID NO: 6303 - DNA, 753 bp, Glycine max
tggtctggcactctataatacattgtgatgagttccggagcttgtttcctacatctaccaaagtgaaatgtttgagtgacgccgggtttttcctagatgcgtaagttttgttttatactgaattctactggcctgcaccattagcctagaaacttagatataattgattatatgttcaatcactgtagagttgatgtatctgggggtcacacactgaggaatctgtttggaggtgtagttaagttacaggtagtatatttaatgtcgtataaaattgtctaataaatagaatatacttatggatctatgttgttcttggctcaactttgaagagtcaattggttcaagcttgcaatgaactttcttgttactggttttactctggtagtgtttagaaattttgaatttaatatgccttgacattgatgctgttgaaactgtaggaggtgcaaaaaaatctgccaaatagttgtctcaaccaactggacccaacttcggtaatttttttattctggatttcattctattgataacatgaaaatgctaaacttgcaaactttaaacatgcaaattttctttgggcagtgtttttttcctcagaatttgatcaactatgttgagactccactgtttctgctcaatgcagcttatgatgcatgggcaggtaatattaatgaaattcattggttctcttgtaattttatgtcaataatgtgcataattatatgtgcaagcttgggtctctttatttgc

SEQ ID NO: 6304 - DNA, 840 bp, Glycine max
  misc_feature (788)..(788): n is a, c, g, or t
attgagaatgagtacaacctatccaacgtgcttttagagaggaaggagataattatgtccaatgggccgcaaaaatggcagtgtcactggatattggagttccatggatcatgtgcaagcagacagatgctcctgatccagtggtaagttcatgaaaattaaatgtttgacataattgattttccttcaattccagtgatcgtcgatataaattaaataatgcatgtgtatgtacgtgttatctttgccctgatcatgcatgcctacttcatttggcagattaatgcatgcaatggaaggcactgtggtgataccttttcaggccccaacaaaccttacaagcctgccatatggactgaaaactggactgctcagtaagtatatatattcgttggctagagatcaattttttagtttttttttttttatgtattcatgcaattagtaaattagaacgtaccctcgaatgaagatgcagtgacttagtaaaccggacttaagtaaaatttaagtcatttgatcttcatgtaaaaaaaattaaaaataacggtcacttatttttgtcaagtatttaagacaatgttctagttttggcttaccccactaatttgttggtaatttgcactacaggtatagagtgtttgggagatccaccatctcaaagatcagcagaagacattgcctttctcagttgctcgcttcttctctagaaatggatctttggtgaactattatatggtaataaataaaaggttttttatgataaagaaattaacttatggacattnatttgggtttcttactaaataaactcaatctgaaactgggtgtagtaccatg

SEQ ID NO: 6305 - DNA, 805 bp, Glycine max
atgcattttggtggatgagaatgaccgtgtggttggtcatgattccaaatacaattgtaagtggacttttgatttttttgaaatttttagtttgcaattgcaaggactcacattatttggtgttaaaataattgtttcaatttttttttttacttcaataaattatgaattgtgtttttcttgaaagtgtatgtttttctgatttaggtgtttgtaaaagttgatgttaaaatatatctgggatttaccatctttaaattttctcggccgactcctaatatgatatgatttgagaaaaaaatatgttaacattgtggttcatcatgtaatgttgtaatgtccatgtttgtaaatctcttcctgtgattaaagggagtaaaatttaaattttatatttatactatatagatcggtttgtcatgattatgttttactattaattatggttttggatttaattactggctatgcagtattttattttgttttttttttttttcagttccctggcatgcacacacatggaagcatatcaagtgagagcatactccagtgagagagactaatcttgaccatgtagttataaattcatggttaagactagctcctctcatgcttttgcttgatatgcctgccccctacatacataatggaacagtcatcaatgagaaacataatgaaattagtaatttataatgtacttgagagttaaagctgttatttttaatgcaaaccaaactactaaaatatcaatggatgcaagccctaaaagagctgcaaataaaaatttggtatgcaccataaa

SEQ ID NO: 6306 - DNA, 886 bp, Glycine max
agcctaatgcaaggtttcctaagtgatggccatagtttggtagttgattagcatggcctttggttatgttgctgatacaaggaattggaatcttcccgactgcactgtttgtagccttctcatctgtattgaccttcacagatttattgtcaagtttaacaactgacgatggttttttgccggcaaagtcggattgaaatttctgggttgtggatgttttttgtggtggcttgttatgtaaaaggttatcttcaagcaatatatggggtgagcctgctattaatctttgcacctgcttacaagaaatgatttagttactcctcatattatgatgagtgaaattaaggtgcatatatttaatagaacaagcagccaagaatatgtagtctggcaattacctttatcagtctatgcaactcagacacttgcttgacaaagattttctgttgactgaatagagcaatgttgtcagtatcaggtccaagtagagatcaaaataaaaatttaaaaaatcaagggacgaaaagtccgcacttcaagaaatagttcactagattcaatctgcattaaaatttgagaaatgcaaagctgtacgtttggaggatgaatcttgtccaagattaaaaaacagaggaaaactaatgaaaaattgaggtttggaactctttttccgttaattcaaatgaggtaagcttactaatatttgaaaaggctagttgatgcaagaagcagtaaaatccaaaagtgacttacccaaaatagggctgttcataatccatactttcaaaccagaacttatagggcatggtataatgcatgtcacggatattcaaaaaattaagtgaatggtgggctggggattcatctatcggttggtagattggcc

SEQ ID NO: 6307 - DNA, 781 bp, Glycine max
aaaggcattgatcgttcggcatgggtcacgtaggttccagcaaggacggcaccaaggtggggctgtccgctgctgcgatggacatcgacgacgacgacgacgacgacgacgacgacctcggcgacgtcgacctagaccctacgagctccgaaatccttgaagaactcggcgaagacatggtgaaatactggtgcaagaaagcgtcgatgctgttcttcgacgagtacggtctgatcagccaccagatcaactcctttaaccacttcgtcgccatcggcctccaaaacaccttcgactccttcggagacctagtcgtaactcccggttttgacccctccaagaagggagaaaacgaacacttccgttacgcctccgttaagttcggcaaggtgaagctcgacaagcccatgttctggggcggtgaagggaatgcgcaggagttcaagatgcttccgagacacgcgagaatccagaggatgacctacgcttccaaagtcaaaatccaagttaaagttcaggttgggcaaaatggagtgatgccgtgtaatgtaggtttgttgctttgttggagcaatttaatttgtgatgttgtgtgtggattttgtaggtgtatgttccgaagaaggttcggagtgataagttcaagactgggaaagaggagttccttgatagagagattatgaaggaagacgagagggaaatcatcattgggagattgccagtcatgggtcaagtctgatttgtgctggatgaaagacgcgggaaaggatgatgatgaatt

SEQ ID NO: 6308 - DNA, 852 bp, Glycine max
aatctgacccaactgagggctccgaggagtttaatcaaatggtacatgaaaatttcttaatgtactccaagaagttaaatctgaacttatatgtgcaaagaaggtacgaggaccagggaaaagcgggtagtttgtactgcatcgtatgtggcagaaggtctgttttcttttctgtgacgctgttttattaaatggagcacttctgttcacatattgaataaggagtcctctagtatttaactcacaggtggagtcaagtacatgtgctattattccagggatcatgttttaggttcccaaactttggaagtaaaacatgttggtatgtataattgttgtactttattaaggcagatacgtggacggtttgaatagcaccaatcccatgacaataggaccaaacatatggtaaactgctttgtggatgaacatgagtctcaaagctagctgaactggtgtctttgcttttgaatgatggtgaaagttataattaaaattttcttccgtgttgcatgattttgaagttaggtaccttaggttagaacttttgttagaactggcatctaactgcattttcaaaatgtaaataatttgtttaggtatttattttagcttttaggaagaaagggaagactgctatgataacctgagacaagataatttgtgtggcttctgatttctgatcttcaaagggtaaatgattttgaattattgacttaacatctacagccacaaaaaggattgctctgacttgtcatgacatagtaattataggagaacactggtagcttaaaatgtctagacctttgaggactactggctttgagaatagattttcctggtaactaaggc

SEQ ID NO: 6309 - DNA, 866 bp, Glycine max
tcttaacctacacaaaacacaatatggtaaaaccagtaaccaatagataaactgaataataatacgaaccttatatatgaagacaagcacaaaaaccaagtaggcaggagcatatctctttacaaaaattacttcaccttttgcttatcaacattgtaaaatgcaaaaccatgacttaaaaaatacagttcaacttattccaagcttgataagcatgtagaagttcaattatagtacagaaacttctagtagctcatcacaaacttttactccctgtctatgtgcatgtttaatttcacgttgagtctaccagccaacaattttaggtaaatgtttacatgattgatctcatgtcaaataattgattctaagttcaaaactgattttaacttgaagcaacattaagtaacttttgtattagattaaaacttacttcaccttccttctagaataaaaacaccctaacatataaatcatttcactttgaaatcaattttgtaaattcaatttcattcaaaattaattttgcaaatgttcaccctaacacaaacacactatatcaataaaatgccaaagtcgatatcatcaaagcaccaagaggcatgcacaagttccaagcatgttatacatatatgaaacatgatactaatgaggttgtctcacatggtcaagcaataagacgtcatcttcctcttccagacgtgaaaagtcaattgcacgctgacctggtacaagctccataagcataatcccataaccaaaaacatctgtcctttctgaagattttccagtggacaagtattctggagctatatgaccccatttgtccacgaacttgagttgtcacattagtatgtcgaatatac

SEQ ID NO: 6310 - DNA, 840 bp, Glycine max
aaactgcatggaatctttccgctcatgaagagagtttgataaccagtgtggtttttgctggcatgctaattggtgcatactcatggggcattgtttcagataaacatggaaggaggtaggtttcttttttccactagttcatttgttagttgctctggcatatgtgaattagtatttcattttttgggggcgggggaatggcctgcttatcaaatctaggattagccatacctcattaaaatcttccaatggatttatatatatggatggtaccaggctatgctgaacatattatatcaagttatcttgtgcctccaattaggaattataaggttggtctagtagtgaccggagaagggggtgagaggtcatgggtttgactcccccaacaaaatactaacaattaacaataaaaaataaaatcttgtgcctcctattatgtcataaatgctttgttttcaagtatacttgccattgttggttcatttaataacatttatctttttctttggcttgctttaaaaactcaggaaaggattccttatcacagcgacagttactgctttggctggttttcttagtgcatttgctcctaactatatatttttaattgtcctccgttctctggttgggattggtttgggaggtggccctgtattatcatcttggtttctagagtttgttcctgctcccaatagaggtacctggatggttgtcttttcagcattttggactcttggtacaatttttgaggcctcacttgcatgggtaaattttgttcatttcctttcaaaattttcattaaattgcaaacatgttcttaaaatttatttcaccctc

SEQ ID NO: 6311 - DNA, 887 bp, Glycine max
agcttgcatgcctgcagcatctctatgcctcttttgaggaagaacccggatttcttcagtttgcaacaacaataacatcaaatgatgttgaggaaatacagaattttcttgaccaagctgttggtgctaggtctactgattcttctagttaatttatattcattgtagatagaaattttatcgtttgagtttaaaactatacatcatttcagcataatatatttatactctttaagttatgttaatgtgattgcctcattactaaaagcatttgatatgtgtgtttgatttgctgttcaatcatgttgaacgtgaatgacatgtgagacaaggatttatgttgaatgtgctttgtttagaaagtgggaaacaggcaaaacaaacacactttaattgtttatctaacattcacatctgtttccaactttggttttcttgcaataatttgaatgagaaattttgtcgttgatatttggctcttctcttgatatgtagttgtgagggattaattattaaaacattaaatgaggatgctacatatgaaccttccaagcgatcactcaactggctaaaactgaagaaagattatatggacaggtaaggacgtgacattcatatttcttaattctttttaatcttaatggatttctatttactcattggctctaatttgcagtataggggactcactagatttggtacctattgctgctttccacggtcgtgggaaacgtacaggtgatcatgctctttaatgtggtgatgatgcctatgttacttatctcttacatcatatgcataaacaaggctatgccctaagggattttatatatactgctactgtaaacctttagctcaaagtagtttgaaatgaaatgatggcatgt

SEQ ID NO: 6312 - DNA, 847 bp, Glycine max
ttgcatgcctgcagaatttttaaatgcttaatatttaggtgcagattctcaatttcacttctgcttctcttctttatattgttgtatgtgattcattacattgcacggttgccagattgtccatgctttgttcagtgtattcagcaaattattaaagagtagaactctgaattctctggtctgagagatgttaaagttggttgtttctgcgtcccctcttcgtttgcaattatcctctcgccattccatgtcgttaaatttgccacattctgccaattcattagagtgagtggcaggtttccatgtagaactcaacaacaaagcacacttcaaatcttagatcattaattgtggcatcctccaaaaatattttaaaaacataaaataaaataaactaaatcatctttggacttttctgaaccttttccttttccttttatggcaccataagttggttccatatataattttattcaatattttggtactgtcactgtcacatgtatctttcaccacatgtggggttaataacaattccaatttttatcatatattcaaagtctatttccctattcattctatttaatttattctttaactttcctttgatttatcctttcttttctttcttttgtgtactggttgatttggatcatgctcatgtcctccaaggtaattgattgcttgcttcttattttgtttttcatctctcctcttcactccctctctcaacaccggttagattcatgggggaaatatattttaaaaaaataaagtatataaataagtcacttcgttacagcttgtggcgtattcataatcctagacaaaatttgtatcttagcat

SEQ ID NO: 6313 - DNA, 873 bp, Glycine max
ttcgccagcttgcatgcctgcagaagaaaaaaaatagttgtttataaaatggattccttgtcagtaagtctcttattttattctttgaatttaacacaaatttatttaagggctaccttgtgatggcgtggatctttttgcccctttttttggtagttttaaggtgactggggttgactgcgacaatcactggatcacataagttctgtaggctaattaattatgatggagattctattctagtattttcatacatttatttatctatagcttactacgattattatgttgaaattaactttaatccagaatatagcgtgcgaattttgttcttgtacagatatgcgtacttgttttagctaaaaggaggtagagacataaaatatatcctaattatatatattgagcaattagtttattttttattcttcaaatatactttgtaaccaatattttaacatatgaattgcagaaaataaatgtttattttttataaatgaattttttaataaataaatacttctaaataaataaattatataataattaaaatttacaataaattaatattataagcatattaattatattttaaatttatgataaatatattaaaaatgataaactgaaagatataagattaaaaaataatttaatatttatacattgactgacagtgtaaaataattttacactctcaacaaactaattataagtataaaacatttcacactatataatcctttttctctaaagaaaaaatctctaaaaacattcttaatattctcgttaaaaaagttatagctaaaaccgcccttcttttatcgttctccatatacttaatttttttagccgttatatcttttcggttat

SEQ ID NO: 6314 - DNA, 886 bp, Glycine max
ccagacttcgctgctctgcgtgcttactggaagaccgaggacgaaggagttgggatggctggcctagcaggtgatgctgatgcccacccttatgtctccttcactatcaatcttgtttgagtgcagcacccagaaacaagccctctccattcagggtcagcgaaggattcctttgtacattagggtcatgttcaattctttttatttttatttttatatatataattatataatttgagcgtattcaagtttccagaaggatctggtgaattgaagtgaagttttgtggtgccaagttttgatcattagccacttgtatgatgagtttcattgtttgatcgtttgtgattaactgattatgcgactcgaggagttagaatcgttgtattttcctgttaaatatctacgatatattatataatattttagttgtatctttagtttttttgtttttctactcatgcgatgtacgaaattttaatattggatgtagattatgatttaaatgatttttataagtaactaaattatagtttatatattttgtacgaaattttgcaattaaatataattaatgggatttaccctatcttttgaatatttttttttcatttagtggaactaaatatttatgactatatgagatttgaacttccaacatcactttatttgaccagcaattattattaataggtatttatgtatgttaaaatacttaaggaatgtttggtaaaaataataatataactaaaagtttaaaaattagctcaaagtagaaaagtttacttttagctgaaagttggtgaaaacctattaacttactggattagaataatttggtaaaattagcgattaactatttgattagagcaaagatatttttgta

SEQ ID NO: 6315 - DNA, 905 bp, Glycine max
tttcgccagcttgctgcctgcagcagagataatgtgccgctatccaagatgccgtgttgcatatccatatgtgttccagcaaccatgggcagttgctgaaccagagacagtgctcatgcttggacaaaagtactatgtaattccaaatagcacaataagaaagcttcaaaggctttctccaagaagctctccttctccttcttctcctgctcatgaaattacaatcagttcttcagttgatgaaattagaaacacaaaatccagcaaagaggaaaatgatggtgtgctctccacttgttgtgtcttcaggaataaaagcagtgcaaagcaatccaatatctacaagcaatactccaaaaataagatcaagaaatctgaaatcagagcagatgtaagaaatttgagtctaaatattaatgataagagtggtggtttatcacatgatagttgtttcgtgagtctgtttaatggaggcaggactaaagcaaatgctagtgatgtggcaaaagaaacaagaacaccatcaagcagtgctcacctttgtgatggcaatacattaaccaggaagaggacaaaagattttacaggaaatgggttaagaagctctcctaagaatgtatggtcttctgagcattggcaaccgagtctagagagtatcactgaagaatgaaatagatttggtggctgtggaaatcttggctgctgatgatatccaataatctacttttttatttattgggtttttcatcatatatcttggatacttttagatacaataatgctccctcagctgcgtggtctgctgctttcttttttccatgatgacgatcaatattttttcagataaccaattttaattaatttttcaataggattttgactaatcttaaagagaatgttttttt

SEQ ID NO: 6316 - DNA, 852 bp, Glycine max
acggtgaacagggctaatggtcaggtcggcagctttcacctcccacacctggatgaaataaggtaacatataactaaaagtaaatatctttgctacaacgatcataatgcaattttgtcgggataaaaatatataaatgaaaaggcattggcaaaaaatcatgtcaactcctctagatctttcacctcctctttaaaaattgaattgccataaatcataatatgataggggaaatatggttaagcactttgtatcataagcttactacactggtcccaggaattatacaaaagaaaatgatcacaatgttagttagctgcatccattatcctccacaatgtaattagcaatacatttccaaggacactcattaaaaactagaaggcaatgtcaaaaaaaaggttgatggacatcatataaatccccagccaatataaccactcgttcacatttcagccatgatcgagtggcatcaaaccatgatagtattcccatcagtatgaaaattcttccattgaagtaataggaaattcaaaacaagggcacagtaataccagtaagaggcattagaagataactcattaatgatagtacagttttttttacgatcagagcattaatgatatgatagtacattaaagaacagaattggaaaagaaaataatgaaattgccaagaaaagtcaagataattctcacctcactggcttcaaaccagacatcaggatttattgtttctccaaatctatagtatgcctgaaatcaaagagcatgtttaaattaatttataaaatattaagcaggattcagaaaaggttaagagtgaaactagaggcagaacctttttgtttgg

SEQ ID NO: 6317 - DNA, 835 bp, Glycine max
tgtagctacctccaaactcacttcaatattactctccatttgggttgtcagtgaaagatcttcagaatggaattgcagcttattttcctgctaattaagctacattttgttatatgtattccccagcttcatgaatatgctggtatgagcttaatttagacattttgacttgctttttactacttacatgtatgatccatttgagtagcccataaattattaatgaacatgaaatgtggttcattatacatttatacatttacgggtatttcttgtttgaacataataagattcacccaagaataaaatatcaattgtttgaacataataagattcatagtaattgtttgcactttctagattgctttgcctcaaaggcgtccttcaattcctaaattaatatttcaagagaattgtgtttttattatggcttctaagtattacttcttggtgtagagtgttgagtcaacctatttatttatgctctgtactgtacacattcttgtccacattgatgccatttattaatatttagcagtacatgcttcactagcatatgcagtagcaaaaatattcttatacatgtacctgtaaaaattggatactcttatgcttcactacaactcattttatagtgaggatttaagaaaaagtgagcaattttttagctgtaatgtgttgcttaaacagtaaacataatgatttgagagtgtttggggttaataataatggttatgtctccctcatcttgaacaatttgcggctctacactatttttctgttaaatcatttagaaattgtagaaagaagcattcaaagaattcaatatataatc

SEQ ID NO: 6318 - DNA, 829 bp, Glycine max
aattcaattttcatttccaacaaaatccaagttataataccaataagcgaattttgtaacaacaagatacattatgtaaacttggtgtgttcttcaattcacaggtttcaggagaaaatgatcacgtactttaatgaataagctagttctttattgatggtcttctgtgttgtaattggttggactaagtcaatgtacaaactcattggaccgatttgcatgtgatatcggagcaaatttcaaaagaattgagacaagggaattacttttcgcattttcgttttctacttctcacactctctccctgtttacagtcagaacctattctaacaaaacacattcacatgtcacaataagaatttttggaaaacaatttcagaaacagtttttacacatttctgaaaatgttatactgtgtttggttgatcggaaataatagttagagagtgggcataaaggtgatagaaataatatggataatttggcgtgtttaaaatagagtgaatgaatttgaaaaaagagcgaatctcaatatttatttctattctatttatagtgagcattatttcgtgtatcagtacatattttgcaatcaatcaattatttttggttcttaaaaatttacatttctacttttacactttttcttgtattcaaatttatttgacatatgttatcttaaaaaaaagaaacaaaacagaataaactgatctaaaccaaactcagttatattttaagattacattatcttttgtctaaaagttaactcaaatccaatcataaatatttataaatttttttattaacaaatattaattattaatttttt

SEQ ID NO: 6319 - DNA, 799 bp, Glycine max
aaatgagtgtaaagttcagcaaatcaacaaccaacctcagtctgcatcttcagaattcgaggggatgactgcattaattattgacccaagatctgttagagcaaaagtgtctagatatcacatccaacggcttggcattcatgttgagatggtttcagatttaaaacaaggtttgtcaaccataagcaatgggaatataattattaatatggttttgattgagcaggaggtttgggatagagatttaggcttgtcatctcattttgtcaataacacaaggagaattgatcagggggttcctccaaagctgttcattcttgttaattctagtagttcttttaaagctagtgtaaacttgggtgttcataatcctattgtcatcaccaaacctctgagagcgagtatgcttgctgcctcactacaacgagccatgggtgtccaaaataagggagctcctcatagagagctccaaagtttgtctcttcgccatcttcttcgtggcaggaaaattctaattgtagatgacaatagtgtgaaccgtgcagtagcagctggtgcattgaaaaagtatggagcagatgtggtttgtgttagtagtggtaaagatgccatctcttccttgaagccaccccatcagtttgatgcctgtttcatggatattcaaatgccagaaatggatgggtatgtatgcaccctggagtactttctttcagaatctggatatttatcattttggagtaatatttggaatttctacaacatagaagagagtcttttagatctttgtatcgatctaacc

SEQ ID NO: 6320 - DNA, 860 bp, Glycine max
tcagtcttctagggatgtgtttcagcagttcttggggtgggctcaatccgtacacaatattagtaagactaattacaatgcataaggaaatatccatttataattacaatgcataagactaattgctgctgctgatagaccagagttggaatttggccttgagtttatatgctgaatttaaatgctgaactgttgaatctaagaaattggctatcaacagtgagctaggtggcatcttaatttatgtcagacaggaatatcttttcaaaacattatcaatcttgctttttcattaagtttgctgaactgttgaatctaagaaattggctatcaacagtgagctaggtggcatcttaatttatgtcagacaggaatatcttttcaaaacattatcaatcttgctttttcattaaatttggatagatttcttagtaaggttcctattagaaagttaaaagaaaaaaaaaggtaataatctaaaaactacatattttagagatataaaaaacatatttaaatttatataatatatttatcaaattttataataactattttaaaaagtatattaaggatgatttttaaagtagttataaaaaagtcataccttaaaagttaaaagcaagggaaatgagaaaatatataaaattaaacttattttacaatcaagttaacattttaattatttttttcattttctccattttttttttaccatttcaactcatgcaggtgtgtcccgctcatacctttttttatatataggaaaagcccccgctcatatctattctttacaaattgatcttataatttatattcaccctaatcgaaataatgatgtaaacactaaaattggacta

SEQ ID NO: 6321 - DNA, 793 bp, Glycine max
  misc_feature (779)..(779): n is a, c, g, or t
ttccaaccacaccgaagatgagtcctacggcgaagtcaaaggcatcattggaagcagagccttggaagccgccaccggaatggagtacctcatcgagtggaacgacggccacgcgccgtcctgggttcccgccgacttcatagccaaagacgtcgtcgccgagtacgaaactccctggtggactgccgccaagaaagccgacgagtccgcgttgaaaaacttaatcgaatccgacgacggccgcgacgtcgacgccgtggacgccgacggccgcactgcgctcctcttcgtcgccggactcggctcggagtcctgcgtgaagctgctagcggaggccggcgctaatctggaccaccgcgaccggagcggcggcctcgcggctctgcacatggcggcggggtacgtcaggcccggcgtggcgaaggttctcttggatctcggcgcggatcccgaggtggcggacgaccgcgggagaacggcgttggatctggcgagggagattctgaaggtgacgccgaaggggaatccgatgcagttcggacgcaggattggactggaaggtgtgattagggttttggaaggggcagtgttcgagtacgcggaggtgcaggagattctggaacggagaggaaagggtgagaatttggagtatcttgtgcggtggaaggacggtggtgccaacgagtgggtgagggcgaagtttgtggcggaggatttggtgaaagactacgaggctggcctcgagtacgccgtcgctggaggcggtgctcgcgaaaggntagcggatgaagga

SEQ ID NO: 6322 - DNA, 850 bp, Glycine max
aacttgtttgctttccattgtctcccttattgatttctcagcacaagccagatcctggccactaccgacgacatcaatcaaatttcttccacttatcttgcttacacaccccctcaaccatgcaaaacaagtatcagcaatgtaacgcttatcaagcatcaccatgattgattccagtttatctctgaacgacttccaaagcctaacctcctcatcaggattgggaatcccaccaaacagctgtgatgccggaggagatcccagaatgaccttgtaaaaaaggggcatatcattcaacacctgcaaaaacaactcacccacctgccccacggtaacctgaattatacccaacacatcacacaagatcgaaaccaccaaggaggaagcatcaccaggaccagcattccccaaaatctgcgatatccatgacttcctcgattcaagaaacaagctcaacacctgatttccatcaacaaatcagtttaaacccaccaaataacaaattcagcaactaaccgcatttcaaatcaatcaaatctacaaaccataggcaactccacaccaatctgttcttcatcaactaatcactccacacttcatacacataaatctaggcataaatccacaaactgaaagcatttattacatgcgcaccaactcaaattcacaatgaataaaccaaatacctgcttaggctcgagctcgtcgatgacggcaacggcagcgagcgcatccgagtaagcggaaatggcgaggccgcgctcgagcaaccggtcgcggctgcgctggggagatctgcgccctgaagctctcgacgatctgccactgggtgctggagcattgcaaaatt

SEQ ID NO: 6323 - DNA, 799 bp, Glycine max
acacattgcagcaactgcaagtgcttggtacagtcctcgcatcgggtaacggccttgaagtagagggtcagccattttggggaacttcctacggtctttgaaaagcggccgtgcctacaaagttccatgtcccaagaatatgaagacaaatagttgtaaatttgttgtgttaatttagaaggtgatcaaaatattaacatacaaaccaattcacgtgatttataacctagaactaaggctatgttttgataagattttccataagcacttataggagaagccaaaaaaaaaaaaaggaaaaatgaaaaaaacttggaagttaattttagcttatgagagaagtttttttttttcatttgtctttcgtattttcttctaagtgtttatggagaagtttattgaaacatgacaaaacacaaggatgatcaagagagagatacttacccatgcaacaagattatgctctccatgtgcacgcgtattatcaatagccttgcgcccagtaatgagttcaaggaagacaacaccgaaactatagacatcagatttcagagttagttgaccagtcatagcatattctggggcacaataaccatatgttcccattactcgtgtggatacatgagtcttgtcaccaactggaccaagttttgccagcccaaaatctgataacttgggatgataaccctcgtctaggaggatgttggacgattttaagtctctatatatcactgggcggatttgccttgtcatgcaaatattccaatccctttgcagctccagctgctattttatccta

SEQ ID NO: 6324 - DNA, 1300 bp, Glycine max
aattaattattaattctgaagctgagacatgtaatgaaggcaagacacaggttggttacccctttagactctgcaaaaaccttttatcttggttttacagtcaatttgtttgcttcattttttgaacaattttttgtaatattttatttaaaagtatattgtgaaagggtaagaagttttctctagttgaaagttaaacaaattaaaatttaagctgtctggctgagtttattatgattgtacacttatacatcccactttgcaagaatcatgactgcattgtttctgttctgatgccttatatatggaatcagtattattaggtattagcacattagacaaattgggagatgattttgtattacacatacagctttcatgggtttgtctgcattaaacaatatctatgatctattgtttctattacttctggtctgtgattccatctgtgcatcccaggttcggctatctgtggaagatgtcacagcatcagggggaaaaagagaggtggagacattgtctgatgagggtccacaaggaatcttggaagcccaggatggatcaagaggactagctgactttgaggaaggggcagatagtaaaagctgtgctgctgagatgggaaatgtatctgaagtcccaaaaccctcagtatcagctgagaaggtggaaagaatcttggaagcccaggatggatcaagaggactatctgacattgaggaggggacagatagtaaaagctgtgccgctgagatgggaaatgtatctgaagtcccaaaatcctcagtatcagctgagagggtggaaggaatcttggaatcccaggatggatcaagaggactagctgacattgaggatgggacagatagtaaaagctgtgctgctgagatggaaaatgtatctgaagttccaaaacccctagtatcagttgagaaggtggaaggattatctaaggaaggtatagttggcagccaagcaatagtgcaggtatcagaagaatctgaaactgttacgggagatggaattgatgttactccagattgtttggctgtgccagaaactgtgtcaaatgatggggcttcatctttgtgctcttcagcagcaggaagtgaacatgtggacagcttgtctgagaaggatttagttggcaactctgttgcagaactttacactaaagaatctgaagcaggtgtttctgaccaggaaaatcaagtagtgcaagaaaatgccatggaagatatggaacatgagtacttgtccgagaaggatttggttggcaacacgcaggcagcaagctggc

SEQ ID NO: 6325 - DNA, 850 bp, Glycine max
ataacgacatagaaacataagaaaaagcaattataactatcagaggttggttataagcactaaggaagcttggcttactgtgaattcagttacttgaatggagctagaaatagggccgaatattccagccgctttatacattgaaagaataaaggcaacacatgttgttgatttcccatcactgtatacccattcatcttgttcaggaattgtaagtaattgatcaaaagctatcccacgcttctcagtctcaattagaatgtcgtgcaaatccaaatcctgaaagcccaaataaaagagatctcaataacaaaaaaataatcagcagtgcttcgtaaatgtattcaatcgattttgtaatgactaatgagaaactatttaaacatatgatgctgggtgaaagcaatacaaaaacattgaaaattgtataaaagctagaatattgtatatatcatatagatatacggctaaaaattaagcctaacaaagaaaaaaattcacatttgactaaagcacttccattttgaaacaaaatcaagcttttccccaagtcctcataaaccaattttgcgttgtagaatggaatttctgtcttgaatcttttgtagtttgtcttgccatgaatattaaaaagtacagaatggcaccagaaatatttggtcattagaaagctaaatctcaaagtacatgagacgcccacttcttgttttgaccgtgaaatattacacataaagagtaaaagaagtcataggacaatatattcatgtaagcacatctactgtagaccaacatcaagatatacctcagtccctaacccgcttgttcagcgcttcattccacatgtttgcag

SEQ ID NO: 6326 - DNA, 890 bp, Glycine max
  misc_feature (855)..(855): n is a, c, g, or t
aattaaattaggggaattatatttagatttgaaatttccatttagtaaataaagcatgatgaatttaaagttgagattgcagataccaagcacataaatgagaaaacaaaatttaatccattataccttgtctaaggaattgagtgtacgtgtcacatattgctgaggaatgccactgagatcatgattcactaatatgctgtatatccatggaagaatatactttccactagatgatctgttgaataaagatttagaaaatgtcaagagaattgagtgcatatgctttggcatttacggaaaagaaaacacataatgaaagatatcacaattgcttgtttccactgtctctacaaattttttaaaacaggaaaaatgtgaaaacaaggtggcatttttctaagtatttacgaaaataagatgttttctgaaaccaaacaggaccttccttaacatgattacaagccaacactgattcccattcttctaaattacttgagctggtgaagtatttatcataagatatcgtttaagttcaagaattaatataaattttaccatactactatttggttcaatttgattccaattctatcttgtttatatagttagttagttagaggggtctaggaggtaaataaataggaggagggtgtcaggcaagaggcattcagtcttgaatcatttgagaattgagcttttgctccctgtaaaagaagaaatccttcatgagggggaaacagttgttggagtctggaggagagatctctctcctattttccatcccttcctattcctattcttggttcctaacacgttggcttttcattttaacttgaagaagaactagacatncaatgctaccattactaagtactaaacattactct

SEQ ID NO: 6327 - DNA, 834 bp, Glycine max
cactggtcctctgcaccagatgcgtagtagtcaaacaccatctttggcaacttctgctttgcaatagcttcatactcgctgacattggtgatctccatttccagaacttcttgttgatgctacccttcaaaaattctacataaagaaaaacttatatcttcaattatgttctttcacataatctgtagctacaaggtttaagatattccaagaaactagtatgggttgatataggaagaaaactactatgccaacccaaaatcttcggaataatctaaatagtaaatcttgtggcagatttcagctgtgagaattttcaaataaataaataattggaacttggaaaaaatttcctaaaatttcccagatttttggattaaagaggaaaaaaaaataaagactttggatatgctacaatattgaacttcaaatggaaattaaaacttaaaagcaaaaataatggcagtataagatataaataagatacataatgaaaacctctgccaaaaaaaaaataaaaaatcaaagctacatgctgtggttttcctctaatatttcaacatagtattccccccatcatcacatagctgaagccttctaaaaagtctacaaaagcatgatatataaaaaggatcaacaacatgtatatatacataaaaaggagtaacaacaaaaaaaaaaaaagatgcaaagaagattgatgctttaagctatccaaacacaaaactttggttcagcaaataatagtgagcatgaaactcatacacaaagtgagtttaacaaaccaccaagattgaaatcattggcatacacacaacacaaacactactattc

SEQ ID NO: 6328 - DNA, 871 bp, Glycine max
gctaaaatgggtacatgccagtttgtaatattctcaaagtcatccatagatacttctctgttcacactatcttccatctccctaactcgctttgtagcttcaaatctgttggaaaagaattgttattagcaaaatcgtaacacaatgataattcttgatttagaaataaaaagtagataagtaaattcttcaaataattttttaattagaattgtcaaatgaattgactccacgtatgggctcatagctggttccaaaggctggatagtcccttgacaatcaacataaaactttgaaagcccaaacgtggatcactagcgatggattgtgtgccaatgctaagtcgttacccgaaaatagcccaaatgtttatcactaaatgcatactttttgcgaatgatataacttaaaatcagggaatcaagggaaaaagttaaccataaagtttagttttggagacaaacactagattcagtcggagtaagacaatatatgcattgcaattttagtaagaaataagatatagaatgagtatgtgaagatggatgtgtgactacacaaaaaagtacaagatatagaatgattgtatactaggagatactggtatactggtataacacctatcaagatgacaaaaaatcgactaagatggcttggacacatgtaaaaaaggtcattagaggcacaatgacaagagtacattgcatggtttttagccttgtgaaaggataggagaccaaaaaggacattaaaggaaattattaaaagagattttatgggaaataacatcccttagaatttggtttttacaaagctcaatggcatcatgttgatccatgtatttcacctcacttcatgagacaaggccatt

SEQ ID NO: 6329 - DNA, 814 bp, Glycine max
tcgacctgcagcatgtacagtaccacgtacatcagttaggtttgacaataacgaaggtgtaatatgggggtgaagcgggagtggcttttgtacttattgttcaaaccacatcaattaaaatggctgcattgtatttgtatattcatgtaaagatagctcaatgtaaattaaacataataacagatgactttgggctccaacatagtcaactttgtgcatgtttggattgaagtcagaaatattgtgtgcatgtttcaacttaaatctagcatgtaaaaataagaatcttgatcctttaataaaattatttttgcctcaaaaatatttttccatctgatttttaaacatgcacttcttagagccaacaaacataaatgacacacagcaactaaaagtgaaaggacgtttatccgtgtaatctatgaaaatccgattctctgatccgtgcatattcacttgtgagtaatgcatgaggtactgccttctgcattcttatctgtcattcaatttggacttagaaattttaatgtgtttggtagagtagactgtagagagtaaaactccgcctgtgtcttttcaattcttatctttgcatattcacatgtgagtaatgcatgatgcactgcctttgaataagagtccttatagaagttgtttatgatctttggagagtattcaaactcagtcacagtgtacatgagtttgtctcattcatacaactgtacattaagcttttctctattaaatttgaacttgtgacagtccgggttaagttgggttccttaagattcaactttaggggggcttttaaatc

SEQ ID NO: 6330 - DNA, 850 bp, Glycine max
agtttatgaataataatttcttcaacttgggcttctaaagcagctctgtacttgtttcaaatcaagattgcgtcttttttcacccatataatcgtccctaacgccaggtgaaacataaaaactttcaggtagaaacacgaataaggaacatcatttaggtagtgtaaactggtttggctagtggaagtttttaatttatggagaaacatgaatggtggggtcaaagaatcaacccaataaaattttggcatgttaattcaacgtgttaatcagatagcatgtatacaactgatgttacttatatatacagccctgcattcagttcaaattagtgaaaatcgaattctgaactgtaaactgacaaataaaagtccatgcccagacgaagaacagcttcagtctccaatatgcatcagtttaaatctttggaggtacctgtggggtcaattcatccataaggtttcactccatttggcatctacagacccagacaaagaaaagctccagtttcaaatatgcatcaatttactctttggaggtacggtggggtcaatttgtccattaagtttactccttttttagcatctcttctaacacccggctttcagctttccagattcactcccacaaatttatccaatacatttttaaatgcctgcaccatacaagttaagaaatgaaacaaaatgaatattttaattccatgggcttcaaaattgtgcatatatttgtttccttcagttgttcaacatttaataaaatttgttttgattagtttgattaaaacactccacgtttaaatgactatgtatttgtctgagcagcaaaaatctcttacccaattacatat

SEQ ID NO: 6331 - DNA, 859 bp, Glycine max
aatataatttgtccagctaaggcttctaaaccagctctttgagctgtacttgtttcaaatcaagattacgtctttttttcacccatataagccaggtgatacatgaagactttcaggtagaaacaacacaaataaggaacatcattttggttgtgtacactggtttggcaagtagaagtctttaatttatggaaaaacatgaatggtggggtcaaagaatcaacccaatagattttcggaatgctaattcaacgtattaatcacatagcagtatacaactgatgttacttgtatatacagccctgaatacagttcaaatcagtgataatcgtcttctgaactgtaaactgacaaatagaagtacaggcacagacgaagaacagcttcagtctccaatatgcatcagtttaatctttggaggtacctgtggggccaattcatccataaggtttcacttcatttggcatctacagacccagacaaagaaaagctccagtttcaaatatgcatcaattcactctttggaggtaccggtgaggccaattcatccatgaagtttactgcttttagcatttcttctaacacccagctttcagctttccagattcactcccacaaatttatccaatacatttttaaatgcctgcgccatacaattaaagaaaataaatgaaacaaaatgaataaattccacgggcttcaaaattatgcatatatttccttgagttgttcatcatttaataaaatttgttttgattagtttaattaaatgactatgtatttgtctgagcagcaaaaatctctaacgcaattatgtattttctatctatttgaaagtgaaactaaagtctcaatgcac

SEQ ID NO: 6332 - DNA, 868 bp, Glycine max
tgtaaatgcaagcatatccttctcatatctataacaaattgcgatagcataaggttagaggcataacatttatttaaacttgacagaatacgaatatcttttatgagtcgagaagttgaggtcatcaattgagtccaaaactagggtaacgcttggcactcttatccatgagacaacttagggaatctgattcaatcagacagttatttaaactataagtgcatatcatatgcaaaaatatagaagcagttcaaaacatctgattcaatctgaaatgcacattgatgattaatcaaacagccaataagcagcaaaagaactgtagggtccaaatctttgactttcaataaaaaaaagaagttcaatatggaagcagctctaaccgtaaacaaaatctagccatgtccaaaattttcatgatcataatcaggaaaactttcatgtcaatgggtccttcaccaagaaacatgctattttactttgatcttattataaatccatgtaggttcaagtgagagatcacttttcaaggaaataatagatcattccataggctctaaacagttaacactagatccagcttgggaaaacccaacaacaaaagctagcatttgtaattggagagcctaaggccttgtaaaccccacactagaatttcattcttccaatgtggggctcaagtccatacctagcaaattggatcctaatattctaccactaaccttttgactagtcctaggcagacattgctatgtcaatatcaccatccatggctcgtttgcaactaagaaaaacgcgtgaaaagctctaataccaattgataagaaatcttggaaaaaccatacccacaaagcttacttttgcagtt

SEQ ID NO: 6333 - DNA, 822 bp, Glycine max
acgccagcttgctgcttgcgagggtggaaatcagtatattgcatgccaaagcgaccagcattcaagggatctgccccaataaatctatcagatagattgcaccaagttctgaggtgggctcttggctctgttgaaatttttcttagtcgtcattgcccgttgtggtatggctatggaggaaaacttaagtacctacagaggatggcttacaccaacaccattgtttatccatggacttccatccctctgcttgcatactgcacaattccagctgtgtgtctcctgactggaaagttcatcatccccacagtaagtaccacataacacaactacttcctctcctctcctctgttccacattatgacattataggaaaaaaaaaatatattctacaatagatgtcattttacaaaatcaatgttgcattaaatacttttttccaagactatccttcatcaatacttagtgagagtcatgtataggaagagtaaatgaatcattaattaaaatgataaaagatatactaggaagttacttaatgttttctttaaaattcaacaaattaattgcattctttgatatctatgtcaaaactcatataatttggaacaaaagaagtataaaggacaaaatttagatgcagttccttaaatgtttttggtgttattctccaatcgtatatgttgacctttaatgcaaacctatattatgcagattatcgagataaaactctaattttgattggaaaattgtactaaaaacacctatggaactgcatctaagtcttgtacaactataaatatcttgggattactaatattg

SEQ ID NO: 6334 - DNA, 798 bp, Glycine max
atgttcattctggagattttttagctgtgtcaaagatccgtggtaggtggggaggttttgagacactagaaaagtgggtaactggtgcatttgctggtcatacagcagtttgcttgaaggatgaaatgggaaatttatgggttggtgaatctgggcatgagaatgaaaaggtataagatgtggaaaattttaccttgtctgtgtacagcacaacactaacacacacaaacatatatttatacatattatagatacgtcaaatttcattttcttgttcataacttcatatcgtcatcctgttgaataatgaattttgtaattgatttgtagttgccgaggatagtgactaacctccattatgtttttattgattatatttacataaaacagggttatgttatgttgatggtatgtctttgtgcagggtgaagaaataatagtggtaattccctggcatgaatggtggacattagctcttaaagataattccaacccacagatagccttgcttcccctgcatccagagctgcgtgcaagattcaactcgactgctgcatgggaatatgcacggagcatgtctggcaagccatatggttatcataatatgatattcagttggattgacacagtagctgacaactatcctccacctcttgatgctcacttggtattaatctttttcttatttgtataacattaacatatgtgattggaccagcgtttgtacttagaatatgctgtattacgaggaggctactgtattattttgctaaggggggtagtgccaactgattttta

SEQ ID NO: 6335 - DNA, 785 bp, Glycine max
taggttggcttatgtggctcctgagtcgagggtggttggtgctggggagttagttgaccatcctaagaaaatagcccttcactaccttcggacatcttttgttattgacttatttgttgtacttccacttcctcaggtaagtctctcctcatctctcttgcttattataacttcagtatctcatatgtctaatcatctaatttgtgtgcttgttttatgtacaagcatgcataaagtaacagcaattatctgattttgtttatggtcgctaaatctaagatgcaatgtgtattgccgtcattaaattttcagttgccatatatatatgaagatcttaccagtaaagtgatccatccttagaaagaaaattttctccccacataatctgcttgcccagttaaatttaatgctttccctttccttgttttgtttaggatattataattttctttttaaagaacttcagattatttgggtgtttgatctgtcaataaatgtgacgttctcttaatttctttctaagctgaatccagttctacatcctcatgtttgaaattcagatgttatgtatttattgttctcattggtgtggacaacctgaggaataatatgtattggtttactatctttttagtccctaaactttttaggatttctgtttaagtccttgaatggtttttagttcctcaattttttttccttacttttaaaggatgaaaaaaatttaagggactaaaaataaggacaaaaaaaagttaaaagacgttaataacttcgtaccccat

SEQ ID NO: 6336 - DNA, 853 bp, Glycine max
atgataggatcagataactgttttgatggtcagggaataagtggacaaaccctcaaagaacaaaggtctctggacattcttaatttgctaaacttgtcaacaaatcctcagcaatgcaatccattctgccctaacggtatgcatctaatattctttccgaatagcagttttattgctgctgtttctttacaggtttgaaaggcgagatttgtaaaacactatttttattgtagcacatattgattaattagattgcttatcttaattttgtgggccttataatttcacgtagattttgtgctacaataaaaatagtgttttacaaatcttgtcatgtttgaatcacatatgaatcatgaagccaggactattactagctaatggagggttatttgttgctgattgttgcattaaatgtttccaaacctatcctagatcttcttcgtttatatgaaaaagagagaaaaggttccttcatgagatttagatcaaatagcatatggatggttagcactatccactccttttcttttgtttcccatgtttgatgtttcactaattagctaaaatggaaattgttccgctgtgctaaaacctgattgcaaattcaggacttctggtaaagtagtcattaggataaaaatttcatgttctgatagacttcccaaaggacaaccatgtagctaatactgcttggtttttgtttcctttgttctgatggctttgtgttgcttggctatttcttttattgattatgtcctgtttactaaaatatcaatttccctccatattgcctgtacaacaataaaaggggaggatgatgggaaaatcagcttttctaccatgccagcag

SEQ ID NO: 6337 - DNA, 786 bp, Glycine max
ataagaccttccaggttggggacctacttggtaagttcaactcatcaaattattttatagtgtacgtgcttttgctaattaccttcgacaatttaattacaatgcaaatgtaatcacttttaatattttcatctaatcataaattatcatatattataatattattaattttttaataattactttaagaattatacctccacataagagttataagattgaatgatagcaattgaaaaaagaaaaagaaaaatagagttcaaatttgtggatcagtttatggcctcttaaacacaattcaccatatataataaaactgttaatttttatgataattattttaaaaaatatattaatagtaatttatgattaaacgacgttataaacctattttatatcatcataatcattaaactctttttatatatcacaattcttacctttaatggttcactatgaaatatgattaaatttataaaattatcactcttatgtcattatttttttacggtagaactttggatttcatattattattgatacaagagtaaagtgcttcttaataatggcgtagtgttcaagtatgctgttggaaaacacaacgtgttcaaagtgaatggaacagcatttcagagctgcacgattcctccagcaagtgaggcattgaccactggaagtgatcgtattgtgttggcaattcctggcagaaaaagggacatatgtgggggttggtggggcactgcaatgctggccaaaagcttgttatcacaggtcaaccccaaacac

SEQ ID NO: 6338 - DNA, 797 bp, Glycine max
aaggacatggcaattggggtatatcatgctagttatgtaattaaacggaggggggttttcatcatctatggtgttcacagcacatatcggaatacgttcttttccataagaaatatcatcaacacatacaccttctcttgttttgaactttttagatttcttcacttccttcaaagcaagctctggttgaccaaggattcttcgcagtcgaaacttataaaccagcttcccatgtggtcccacatcctgccaacaagactcaaccacatacagtccatcataaacatatatcctgcactttccatccattgattcagagccacgtatcaccctaacactgttcttttcctcaatactgttcttcagagcaagattgccccgctcaagcttctggtcttcaggttctttatcagtgttcatcacattcccaccctgccctgtatatatcaagccatctgaattatccaaatcatcagcataagcccctgacgcaacaatactagttgcaagaatcttaccattttgcttcacataatctatgccaccctgaatctgacgatgaaggccaactatattaagctccaccctgtattgaaattcatcaccaacttcaaccccggggacatcacccagtatctgcttgcctgagttaacataatgtccattctccttaaggatctttgcagcaattaaatcaactcttttactatttgctcgctcacttaactttgattctacttcctggaaaagctttctgaaaaccacttgaaacaaccgtaaagttttcctcacttttt

SEQ ID NO: 6339 - DNA, 874 bp, Glycine max
  misc_feature (837)..(837): n is a, c, g, or t
aaggagaggaagtggaataaatattaacatcaacagttaaacattggcgacaaggacaacagacaatatcactaagaatagtcttatctcaattaactgatattaaacaagatatatcacctgtcccaattttggaaatcatgatggttacagttcataagatataggctatgaaacacaacatactgaagaacaaagttcacgtgacatgggaaaaaaatagacaaatagaaaatacaaaacttattgagaaattcttgaaccaaagagcctcactgaaacactatagactcattaaattcaagtgtttcagtttgcactgccaacacaggtaagcataacagagatataaatctttcattctacaattcaataaataaaaacaagaaaaggcaacaggcaataactgaaatgtatcaaggatgagaatgagagattggaactctttcaaaatgctgaatacgggtcatttttgtagaaaaacacatggtcccgatttaatacccaggggaattaaaagacattcacactgaagtcctcttcaaatagaaaatattgcagaatgatttcattatccgcacatgttacatgataaatttaaaaattacaatttacaacttgttcgggcccagaacagctaatgtatttatataattagacaattgtcaccctaatcatcaatgtaattgttgaatgccccaatcaaataaccctgaaggctgaaacactgttttataagcttcaactatccctttcaaataccttgcatcctcttgtttctctttgactttgtaagtttaaagacatattttagtcttcaggcgtgtcaaaacttanacttatgtaaaaataactaatatattaggggactagc

SEQ ID NO: 6340 - DNA, 892 bp, Glycine max
cagcttgcatgcctgtaggaaggataggaagcagaatacatattaacatcaacagttaaacattggcggtgaggacaacagacaatatcactgacaatagtcttatgtcaagtaacggttaacaattacagatattgaactagatatacacctgtcagaattttggaaatcacaatggttacagttcataaaagatacagctatgaaacacaacatactgaagaacaaagttcatgtgacatgggaaaaaatagacaaatagaaataccaaacttatagagaaattcctgaacaaaagagcctcgctgaaacactatagactcattaaattcaagtgtatcatcggtttgcactgccaataaagttagcataacagagatataaatctttcattccataagtcaataaataaaaacaagaaaaggcaacaggcaataactgaaatgtatcaagaatgagaatgagagattggaactctttcaaaatgctgaatatgggtcatttttggagaaaaacacatgcatggtcacaatttaataccaagggaaaatagagaattaaaagacattcacacttaagtcctgagtaataaactccaaagagaaaatattgcagaatgatttcattatcagcatattttacatgataaatttaaaaattacaatttacaacttgttctggccagacctgctaatgtatgtatatgttagacaatgtcatcctaatcatcaatgtaattgttgaatgccccaatcaaataaccctcaaacactgttttataagcttaaactatccctttcaaaacattgattttctgagtttaagaacattttagtcttcaggcgtgtcaacttggacttatgttacagactttgaaacaactaatatattt

SEQ ID NO: 6341 - DNA, 881 bp, Glycine max
tctctagatcgacctgcagccggaagctgtatgcattccaataagtgggtagctacttttgcttcacaacaggggccctatacattaaaagaacacagtggattaagttagccgtgaaagttgattatatttgccattgtagatccttatttatacttactggccacaagtttcaagcataaaggcaaacagaatttgctagaatgagaatcgtagtaaatatagattagcagaagcattgtcctctgctgcattatttttgtgcaattacctgtaattaatttttgtttcaaatgaaaagttgattagtgcttcctgatacatcttttccataacatcaacattatggggttgacagggtttgatttggtgaaatttgttttggactaaacaggagagatcactgtcacttgattggatatcagccactaaatttcaagtcacaaaaaaatgtagtaaaagaagcccacattcgaaaatcagctcaacattcaattaatccacagaatcagttgcttgctgatcaacaggatactagcttggtagctgagcatcaaagcgacctgagtcagccaattgtgggtcttgcagtgattggcatgcaaggttcgagtcgtgagcagcttgtaagtcattgtcgtaatctgcaaaagattgtatttttctgatgcatggcctgaaatcatacttgcttctgtatgtggaatgaaatatgatcattatttgttagagcatatactcagaatgaatgagatcacttacatgaacagagaggaaaagagagagaacaagataagagatatggtattgaatagaaaatttatttcttacttctttttatcacatatacagagcatcactatttatggtacacatttaca

SEQ ID NO: 6342 - DNA, 829 bp, Glycine max
aaattcacatcaaataagaacattatataaacaagaataaataaattaacagataaaacgataaaataaagtaaaaaataacacctcgaccaccataacctccacctccccggccaccttgaccaccacctcccccgccgcctcttcctccatagcctccgccatcgtttccactgtagccgcctcttccgccataacctccaccatcgttaccaccatatccgccgccgtttccgctgcctttggctccgtaacctccacctcccccgccatcactaccaccatatccgccaccacctcctcctcctccatagcctccgccaccataactaccacctccaccggcaccaccgccggtggaaccgtatccgccgctggctccataagacggtggcgcggaaccgccgccgtcttgaccgtacgctccagacatgatccgatctagggttccttgagaccgcgagaacgagattcttttagcacgctgagtttgtgaagtagagtaaagaaagcactgcgaaatgggcctaaatgtgaagaccttaaagcccctttctaacggcccacgttatcttacttagtcagtttgttgagtcgttccttcacacaagtcaagcttcgtgtaggttctaatatcttgtaaccaagatttacacaataaatccaccattgtaattaatgatgatgccatctatattaaaaaaaatataaataattttataatctataaacttatacattttaacatttaaacatcaataaaattcaacatactttacaagttgtaacattggggtgttacatatcctcgaataactttttttacaat

SEQ ID NO: 6343 - DNA, 900 bp, Glycine max
cgccagcttgcatgcctgcagaaaacaatgtttcagaagtttatcaagcattttaagttggggctaaagtatttaaaatagaaatttcagcaggcaggggatatcatgtgtctttttgtgaaccaaatactatcttgcttgatattatattattaaccaaatagatgaaaactggcagtttctgtgcagggaatttgttgacaagcttggaaatatcaaaagaagaaaagaagggagagaaatgcaggagaagaaaaactctccaatgtcaattgttgtacaagtgtattgctttaatttgcaacagagatatacaataagatgcataaacatgaatgataatagatgcatctttggatttatccataatgagatatcttaccatgcccaaggagatgagctaaataatcctctggcttctttaaatactcttggtgtagacagggaagtgtccatgataagtcaaggatatgaacatctttgacagcttctagccgataaactttaccagatttccagataggaccttccactgtgaacactgggtttgcttgacctttcttgacagcgccaaacagttccacaacccaactctcaagcacatccagagactctgtattatttataagcatattactcaaatcctaccaccgtatatcaattttagtcctactcttgagccctgactagagccattagaagatatcactgtttcaaatagtgtaataacaaaactatttacataacattgtcaagatattcatatgatgatagccattttacaggttcaatttcaaaaaaaaaaaaatctattcaacagtaacaagatgcacctttacccttttcttattctttcattaaaaagaaccttgttgggcatcaatcttattggacaggaac

SEQ ID NO: 6344 - DNA, 109 bp, Glycine max
agctgacgacattcgagattcctcttctgaagagcaaggcgattgtggaggccaacattagggagaaggagaatttcaacgagttgaaggaggaaatgaatcgccagat

SEQ ID NO: 6345 - DNA, 913 bp, Glycine max
cagcttgcatgcctgcaggcgcaggatgacattgaggatctcaagaagcagcttgaggagagcaaggttgagagaaggcacaaggaggagtgcgaggctattaggaagttgattgccatgcagcccccgaggtccgagactatgaaggttatttcagagttggagaacgaaattgccgctttggacgccgagaacacggctggttcgaggttgttggagctcaggaagaagcaatttgcgctgttgttacatgtggtatgcacaatttgcgctgaaattttctgatagtgtagatacttgatttttttaaattaggtctacagaatttaaccgttgttatgaatggtgtgattataatgagaagggattactgaaaattgagcacactaatgacactatagatttgtcttttattttgattaagattcaaatgacaacaatattcggatgaaaccactaatgtatgtgaaaaactacactcactgaaaataaagagtatgttaccagacacaaagagtatgttagaaattacagacacagactattctttgaggtggtagggggacatgtataggtgtagctcgtttagtttgggtctgatttttagaattagaactcattaggcaagtgaatagcccggattaaagcagggtggatggagaaacagagaaatggagagaaaatgaaggagcaaaaagaatggtaaaatagatagaggacatcgtgtaaacagaaaaataacgaagctgtggggtaagataatatgcccttgagctcacatctaagacatgtttgcaaaaggttttaagtgggaaaggttggcctgacactaattttggatcagtagtgactggatttggaatggatgggctgggaagacaatgagttacttgtggaacgacagctgcacatg

SEQ ID NO: 6346 - DNA, 809 bp, Glycine max
agctgacgacattcgaaattccgcttctgaagagcaaggcgattgtggaggcgaacgttagggagaaggagaacttcaacgagttgaaggaggaaatgaatcgccagatcctgctggcgcagtccgacattgaggatctcaagaagcagcttgaggagagcaaggttgagaggaggcacaaggaggagtgcgaggctattaggaagttgattgccatgcagcccccgagatccgagacaatgaaggttatttcggagttggagaaggaaattgccgcgttggatgccgagaacacggctggttcgaggttgttggagctcaggaagaagcaatttgcgctgttgttacatgtggtatgaacaattctgaagtctgcttatactgttatgatatgtatgattgttctagtctctttctgaaatgttgtgctagtttagatgctcgatcttgttaaattaggtctagagaatgcaacctttgttatgaattgtgtgattataatgagaagggattattgaaaattgactacactacatattagtctgttattttgattatgattcaaatgacaacaatattcagtgtgaaaaactacgcttgctgaaaatgtaactgcctcattcaattcaatagtcattgcattcttattcttactagttacaaatagtatgttaagaaattacatgctattctttgaggcggtagggggacatgtataggtgtagcttgcttagttcggatctgattttttagaattagaactcattttgcaagtgaatagcctggattaaagcagtggatggagaaca

SEQ ID NO: 6347 - DNA, 840 bp, Glycine max
agcttgcatgcctgcagtaatataataatatatacatgaattcaggcgacattgtttttctggttggaaaatacatgggttacagaaatacagccagtttaacagcacactatacaaaagcgagtgaactatggatacagttagaaggaagtgtctatacttttatttgagaaaaggaaataaaaatgagtgtttaagactctaaaatgtaggaatgtcgattatgcaattacttggaccaaataaattatcatggcatgtaacttaagagaatgtataggaagaaacacattagttgtaacttgtaattcactctagcgagtattctctcctaatcgagaagctaatagacttatctcaataacatatgtaaggggaaaagttcacagttgaaaccataaatatattttgttttaagacctattgacactattttaaagactcttcacatatccaatctttttaacttccaaaaattaaaggaggtctaagcaaatcctgcatctaactcatcactaaacagttcaattttttaatggttaataaagaaggatcttgcattttttttaactgtgtgccacattcttcttggaaaataaagaagatagccataaataccttcctataattgagcatttaatagtaaaggacttggtttaatgggataagagtacaagacaggaaatatgcttgagaatttgactattgttctaaaatcaaccacatattttccatgggaatagaaacattgttatttaaggtcctagtattaaaaacacacagaatggacatgacaccctgtcatattcaaatatttaaaatgcaagaggttaaagagca

SEQ ID NO: 6348 - DNA, 837 bp, Glycine max
atccaatagttgtttgcatgtagatgacttactggttactaggagtaatgtaatgagtttaaaaggagaataatgttggagttttaaatgactgatcttggattattatcctattttttgcacaaggaatttgtcactacaagtgatggaatttatatgcattaaaagaggtatacaacttacactgaaaagatttcacacgttggattgaaaattctactcaaacaccattgtggtacgaagttggagaaacaagggacaagttggtaaacgcaaccttgtgcaagctgattgttgctccttgagatttttgtttagcagcaggtctgatatagcttatagagtagggttaattagtagacttatgaatcatccaaggctgtctcacttgcttgcagctaagaggatactaagatatgtgaaaggattttgggactatgggttctcaaaccatggcaaaaatgtttctggtgaaatatttggtaactatgactcagtgatgataaaattaacagaaagagtacagcaaggtatgtgtttcagatgtgtggagcatttatttcatggtgttcaaaggagttggtggtgggactgttctcatgtgagaatacgttgaagcctcaatgagagcttgtcaagccttgtggcttgagaacttgatgtcagaaatgaagattagaagggaagagccttttgaaaatgccaataaacaagcaataaagtcaactataagcttagctaagcacccttttgctcatggaaggagcaagaatattgaaacaaattccacttcctcaaaagggaagttggaggttgaaaaatgcataccaagagtag

SEQ ID NO: 6349 - DNA, 1118 bp, Glycine max
tgcggatcagggctgcctcccagacaatacctccaagagcaccaccccaaacgagtagacatcagacttctcagtcaaacgctgtcgtttgtaatactctgggtctaaatatccaatgctacctttaaccttagtgctcacatgggtcattgaagaacccgtgggcccaattctggataacccaaagtctgaaaccttggccacccatttttcatccaataagatattggtgctcttgacgtcacggtgaatgatcatgtgctttgcacctgtatgcagatagtgcaatcctcgtgcagcacctatgcagatctggagcctttgcttccatgagagggaagggttatcggtgccgtagagatgctcacagagggttccttgatccatgaaatcgtaaacgagtatcatctcgttgttctcgtaacagtaacctatgagggaaacaagattgagatgacgaagttgagacagcatttcgatctcgttcaagaactcctgctcaccttgttgagaaccgggtttgagccttttgattgcgacacatgttgaaccgtcgtcgatgtagcctttgtacacgttgccaaagcctcccaatccaaccacaaagagttcgtcgaagttgttggtggcggctctgatttctgcgattgagaacttacggcagaggttggttggtagcgatgatgagccaccgcctcgagaagttccaccttttttattggaaccttcatcgacggccacgttcttcttgcgtttgatgaggaagaaagcaacagtaagggataacataacgacaccggaaactgcgcctgcgacggcggcagttagggttctcgtgctgcctttgcttttcttgtttgagctcagaagaggaacctcggaggtctttggatgagagtctgggttaggtccagcgaggttacctgttgggtcgttgattttgaagagttcaattgcgtttatttgagcgtccttggccaagctttgagggttaggatgcattttcagtgaaagattaaagcgtttctgctgattccctgggatgaaaactacatactgttttaccactgggacccccttctgtttatcgctccaaccgaaaatgtctgcccagtctt

SEQ ID NO: 6350 - DNA, 822 bp, Glycine max
ataatccatttcatttaaatgattattgattaaatcacacacaaagaaaaaagttttatcgtgttaaaatctaaatctattagaaagatggtttatatacttgccaagagttttgcacgcttttttcttggtcttttgggactatatgcagtatgctcatattaggtggtagagaaaaggtacaaagtactttatatcataattacaattattttctaaaagttagtgagaaactatagacaagttttgatactttatcattttgatttgtattctaaccttccaagctcaacaggttgagacattcacaaaagttggacaattggaaaaggccagtgatgctgaacagagtattcaagttgacggttcaaatagaggcaccggtctgagttctcctattcctcttccagcacgtcctcaaagaatttctactggaagagaattattctaccagtaattaatctttcttgtaaaaatgtgttcaaaatgcactctggtgctctagtttctttgtcaaccttgatctcctgatgtgatcagtttaaagaagtatatctgatttccttaatcttgggctgtatatgattgaaaagctcaagacatttcatcaaagagttgtaggtttaaaattcaaatgtctggttccaacatattagtaaactactatgagctcaaaatttcttttaattggatggtttattatctttcgttttgaaaactttcatgaacaaaatgctgaagattcactaatatttggcttctttctcttgggcttgctgatatgcatgatttcttttcatgttaatattaggagaatagcac

SEQ ID NO: 6351 - DNA, 911 bp, Glycine max
agcttgcatgcctgcagaattcaccatcatttgggtggaagtatattttcccactccggtaaagaccacatacaacagcctgaaataatatcaaagtagaaagcattaatgaaaagtctataaatggaaatttgagtcaagaaattacatttgaagaaagtaattacttcttgaaatctatgtcttatttgcctatatgtcattccttctagattaggcaagctgcaaagattgaatacattttctgcaaatggtaactaaaaattagaactcaagaataaatgcatgtacatcaactaaaaagtcatcataaaaggtttaaacagttttcaaatttaaggcaaaatacctcagcctacttcagtgtaacaccaactaaactaggaaatggaagccaatatcaaattaaaggatagaacaaaaaagtctaaaataaaatatgctttatgttcaccttagaatttgatattcaagtctaactcaacctcacaaaaccggctcacaaagtaaggattggtcaagctttataagctctatttatgttgtctctaggcggtatgagactaaatacacccccttgacactgcaattaaggtaacccaaagaatccacaattaacgcgacattccaacacaccccctcactccgaaagctatgggctactaatctaggatagacattgatatcatcttagaattttggcctagagccaaactcaatcccacaaatctgacttctaaggtgaggattgctcaaactttataagcactatttaagtcatatctctaggcattgtaagactaaacacaaccctcagggctgcaattaaagcaatccccaagaggcagcaattaaggcagactaggagtaacacaattagacactttccgacgtttattacattgataaca

SEQ ID NO: 6352 - DNA, 850 bp, Glycine max
ctgtagagtcgacctgcagtatcttaatcattttgttagcaccaagaggcttatgtatgagcgatttgcgctgttgttttccattgcaagtgcatggttacttgcacagcttctgatttcaagcactgcatataaccacaagccagaaagtactcagaatagttgccgcactgatcgtgttggtcttattagtggttctgaatggtaagtttgtggactcgttaagtttttccaattaatgatcaataacttgcgtgcctttcagaatcaagtttagttttatccacccagtttcattctttgaatgagatcttgattttatggtttataggggaactgaggagcttatgatcttgagtaaaaatgctctctccttttgggggcttttcatatatgtttacaagttaattaaaagaattgtctgcatttatacaggtttcatctccctttagttcccttcccatggggggttcctaccttcaacttcggagaagctcttgctatgatagccgcttcttttgtttctctatttgaggtaagcactgtgacccttgataattatgctggtgctatgcgacttcactagtctttcatcacaaaaactacttaaaactgaaaaaacatttgaaaatgcatccagtcccatcttatatttgctttaaatttaaacatttttcatgtttacatgcagtctactggtacattttatgctgcggcaagatatggaagtggaacacccgtgccaccacatgttgtgagccgtggaactggctggggtggtaagatacacatgcactatattttggcaattgtttctggaatcataaacagggagcttacaattgatttt

SEQ ID NO: 6353 - DNA, 847 bp, Glycine max
actttgagcatcccttacattaaataaggagcaagacttttgtaatttttaataaatttcggcaagtattagagagtgttatatagaatattttgttagtatttctcttgtttgtagttttcttctgatatgtatggctgaaactgaattgtgattttgagttgttgcaggtatcagagagaagaagcaaaaatacaagcttcggtaaacctccaaaatgctaaagcagagtccaggccaagaaagcttgaggtatttcattgccattcatagattatattctgtataacaaatttgtacagtttcttgcacaataagagaaataggtagaaatgtgaaacaaaataagtgtaataaaagaagataaagagaaaaaatactataaaaagtgtgttacctataatatactcaaaatgctagtatcaaaatgttattctaagccatagatgtaatggcataatataactagtattaaaatgctattctaacttctaagtcataatagttgtaatagctgtaattgttgaatgtttattcaaatggtagttgtttaatcccttctcttaaattaaatattcaatatcaagacaagttaatctccaatctcgagattgattccacttaaaagatttatttggagtcaagtaatttttttagtttttatctctctaaaatctaaaacaatatttttagatttatactaataatcatatgaaatcggttaaaggaatgtaaaaaaaaaaaaaaaaaagaagttacctgaaactaaaattaacttattttacaaagaccaataatgataatttcaaattttaggaaatgaaaattaaataaaaatattttaaaa

SEQ ID NO: 6354 - DNA, 855 bp, Glycine max
atagcaaacaaagaagatataaagttatatcaacaagccaaaaatgtgtgtatatatatatatatatatatatatatatatatatatatatatatatatatatatatatataaatgatattatgttggattgtgttttctaggattacttaattcacaccactatctaatttagagcctgtttggatgcaaagtagagaaagacccctaatgggcaaacttaacgaatatcccaggaatgaggaatgaaatagcttctgctatctactcactcttgccactgagagcttttgaaagtttcaaactctcaaaagcacgcacttatgacttatatccaaaatttctctactggaaaaagtttctctcaaaatcgtttgtaaatatggcacttaaccttcttaagctcatctccctggcaatcaaaatgagcattacaaaaagacccttaatttgaagaagtgggtcccattaacaagacctcgtacccatgttgttttgagtttgattcagcgacagaaagcaacataattatgctcccaaacgatgtcatttcctccgttgaaaaatactcgtttttgatttcaaagtgcatcacggcgaggagggtgaaactcgcaaacgccgtgcacggtcaccttatcaaaaccgcgcttttcttcgacgctttcctcgcgaacggtctaattgacgcgtattcaaagtgcggctgcgaagaaagtgcacacaagacctttggcgatcttcccaacagaccactcgttcgtggaacacgctaatatcattttactcaaaacgggctttttcgatgaggcgcataacctgttcgacaaatgcctcaacggaacggcggtaggtt

SEQ ID NO: 6355 - DNA, 807 bp, Glycine max
ggttgttttattgcttccagtgcatacgaagatcggctggctttgttttctttgtcaatgtctagtggtgatatcattgatgaggttcaaaattactataccatcctgcattttgaaaaggctgcatgtgggtgtgtgtgtgtgtgttagcaaaatgcatacatgaatatgatagaggacttttttttctggtggtataggctacatatggctgccaactagacatacatatagggcaatattttctgtgaatctttaaagatattagaatttggaagaaccgaagaatctaacgtattaacctttaatttctttttttttttcatgatgtccttgtaacagtaattattattctcatatttgcattttctaatttgtctacttttgataaattgattcttttgtctgaagaaatatgcttataggatcttttttgctcaactccagagaattgtatatccttctgaaaatgaagggactgcaagtacttccagaagcatccagagaatcggtatacgtggtactatttggagcatctgtttcatttcacaagattccagacaaccaagcaaggagcataatcctgtactagctgttattataaataggtataatgatacatgtgttgcccactgtcaggaatttattctaagttttgaatacagctctataatggaagttagcttctgtttctgctgtctttgtttgtcaagatgcataattactaaaaccatgcatttttttcctacaggaggggagcgcttctaaatgaactgctattattggaaatggaatgttaaagcacat

SEQ ID NO: 6356 - DNA, 845 bp, Glycine max
atacaaattttgtgaggagtttagtcaatggatctagggactttaatgaatgagaaaatattgcagattgaacagtttgtaaaatcatttttgttagataattatattaagagtgtggtgtacttatttacccagacttgtacttactgtaagacacttgtactacacctaatttatcaggataaatagatacatggagccaaattaatcatgaagttacttcacctgatatatggcaatcttcttcctctttctaatgcacacattttctccaaatgactaaactggtaaacatttgttgtagtggttgaaaagcattttctcttactttcctatatcccatgttgaccaattacaagcttcaccatgttcagttgttcacatagatagcttcagttgttttagtagagtaactagtttttacttaatttgacttttgtcatgtgctgaatttcacttaaatgaagttaatggatttcagattgtttgtatgctaggtatgaagttgacacagatgcatttctttctgttttagcccttcaaccaattccaaacatggattctgtccccaccattgttgaggtttgttacttatgacttatgagcagctttgtttaaaactaaaactaaaaataaaaagcagagaataaactttatttgaaattttattaattaatgaatataggtttcaagttccaagacatgtgagttgttgaagtcaatctcagcattgaaagtagagccagtagaaaatgttgcatcgaaactatttgttcaatgctctcggcagaagggacttataaagatctacaggcacttgctaattatcggagtactgcatctat

SEQ ID NO: 6357 - DNA, 861 bp, Glycine max
aagctgcacatcccaagttgcaaactcttgtcaagttctatgggttgccaaagctacaaagacagatggttagagagaacttacagacatagccgaagaatatacagttcattgctgctatgattggcaaaggtatagaagctaaaactgctccaagttttcctggttgaagggaaagtgtgcaacatgagatatcactaattaaagaataataataataacatttcataggcaacattaggaaggacaaaacttagatacagttctttaggtctttaatgaggtctaattggagaacaacaccaacagtatttaagaaattgtatgaatgtttcgccccattgggaaattccagatttattaaaggaagatcgttaagttgcacatattaccaaagatgttagtctatcataccagctatagagaagaaaatcataaagccggctgatatttggatgactcttcggcttcccgcctttgtcaatgccaataatccagcattctccctgaaacaagagcaatgcatatatgcaaaattatgcagatggataatgaggctcaactccagcatggtctttggagcaggactaggtactaacagagtaacaggaactaggatggaaaagaaaactctatagcttttagtattttttaccaacatcatatttttttagtttaaagtttgtgtagggaatgttaaaaacgaatgttgttccactttttcctgcacaaattttatagaaatgaaaaagaaaaatgtttcttcaaaccagacaagcatgcccttaaaattggttggaccttgaatcatgagtgatatctgatatgtcgaggctcatctacaaaacattcaagggggtt

SEQ ID NO: 6358 - DNA, 875 bp, Glycine max
tgcatgcctgcagcataaaagctacatacagagaatgacaagtattttagaagttgacttgggaaagaaaaattacattttcccaaatacaccatctatgtagaaaaatacatatttgtatataataaatagggttgttttgaagcaactctgcatgttattgaaccaccaagcatttcttgtaaagccatcgatataaaaatttgttacaatccaattaagtcttgtatcagtacaaggatttcaatctaagtttgctatgtacaatcatatcatctggaaacaagtcttatgtgcataatctacccatatacacaccttacacgcgaagaaattttccatgacttaacaacctcaataaatacctagacatttgatttcatggatgtctcaactctaaattgatcaattaattttttaaccattaaataatgcaattgtatttcacctagaggcataaggctttgttggtgtatttcaccatgcacaagttgagcatatatttaaagatcaatctgtgtctttttctgacattatcatagccatagaccatagttttattccctatggcatctacagaattatctcagtcacttttatcagtttcatttttggctaatagttgtcttagcacctaattagactaaaccaaaaacaaattattgacttactatctcttccaggactgacattttcaacccaaacaaattttttttttccttttcatccttgtataatccttgatgacgactccatctagttgatatttatagcaccataacccttggaaaaatatgaggaatcaccaatgttcctctacttcgtcattgttaggaaatatataatcatcatgcatagtaccatcaataacgtaa

SEQ ID NO: 6359 - DNA, 854 bp, Glycine max
ttgcatgcctgcagcttttaatttcccgtccgaagtaaatattaatagtttgctagttttgagctgttaattacatgcatatggataagcatacgtaaggattataaattttatcaaatgaaagagcttttttttttttttttaccagaataagcatgttggggtattctgcatccttatccagaataagtacgtacttatatttcttacaatatagtgccacttccgttccaaattaaccaagagttatggtccaccacgtacgttaacgtcgatccttttctgagtattcgtctccatgtgatatgagagaagctagtggaagaaagaaaaaaaatgcaattaaaattcttataatattaggttaattctataaaagtgcttacgagtttgttcgaatacgtggtataagcatgtataattttgagtaggaatgatatatatgacacaataaaattatatatcctgcatgcaaaatatacatttaatgtggttcaatataaattagtgaataaacaataatataaaaatgaattgttttgtgtgaaggattattattgatatattattagattaaaaagtttaattaccacaatgtattatatgatggtgattcagtgattgtaactgccctggaagacacgccattggaataaaaatggaaaggaagccatggaagctagttatgatggtgatggaagtgatttagatgttgcgcaatccttaacatcttcatcttgcatgcatgtggcatattgccataattgggtccttccacgaggaactgttcagcatcccctacccaaaataaataaaataaatatgaataaatatgtctatcttaagacttacaa

SEQ ID NO: 6360 - DNA, 831 bp, Glycine max
aaatgtggctttcaacgatgagaaattttccattagcaagcctggaagcttctggagcattagaagcctatcatgttaagctgaaagccaaactttttgatgattcacatcttggagcattgcaaagagtagattggttagtccacaagttaacaactgagttgcattcaagctactggcttgaccggtatgctgatgagagtgattctttccagaatgtgaaggaaaaatatattgcttctacatcatggcatcgggcacttcaaattccggactatgctgtttccttggatgataaagaccacctctttgccaaggttgtgagccagaaagacagtagcttaacacatatagtgtggaatccaggatctgaatttgcattctgtgattgttcttggtcaatgcaaggtaacctttgcaagcatgttgtcaaagtaaacatgatttgtgaaaatcttaaaggttatcaaccatccatgtctttccggtcttttgaagaggttttgatggatctatggaaaaagccagtggatgattcttttgcgttggatctgtcattggcttggacccatcagatgctagatcaaattcaaaaacaagttgaactgaataattctactgatattggcactgtagttaacaatatgccactgaaatgggtttctaagaaaggcagaacctacattggcaaaccatcatcaagtttggctcttcctcatggtagcagtaacacaaaaagtgtggttgtgtataataagaagaatcggaaacggaaaagattatcacgattaagatgaccaatttggctggtaccagtagtcatcatgtttg

SEQ ID NO: 6361 - DNA, 805 bp, Glycine max
ttctttcaatttcaatgcttatgagtactattggaggaccaagtctgcatcaccaaaaggtacaagtagtgttaaccttaaccaacttgaccaagagaaactgaagagcaaggttgttgtgtctgggggcatgaataacaacaaggtggtctcaagggagcaacagcagttgctagttctgagagggaagaatggtgattacttggttcacaatttgaagagttgcaaggattctagaaggtcgtttctgttctgggaaccctattgcattgccacctcctgaatcagtcacaaaacaataacaacaacaactaatccaaaaaccactgctcaaaaacactatttattactccatcatcctttttatctctacctagttccactctttcatggagttgtttagtgttgtagtcaaataaaggagaaaagggagtgggaaaagtgatagtgagagagaagagaagagaatacttcatttgtatcgtaagatcagaaaaaatgactttaaaagtattgtcatatatactactcctactgctatttatctgttgtatttgctatttgctaataatctaatctaatacatacacaaacgtaaccttagctcatctttgacttggtcgattgtcttgtcctgccctaaaattatcatcgtttcttagcttttcaactttcttgcttttgtaatctagccaatggggttttggaatcggtcctgtcctgcctaattggtcttattttttgggacacccatgatcattccctgatatgctttgccccctcctcagttttaagttaggacatt

SEQ ID NO: 6362 - DNA, 845 bp, Glycine max
aacccattattcaagaatgataatcatagacgtgccatacaccttcttttaaaagttaaggtcgtgttcagctaccattttaagggctgtgaccccttcactgttgtttccaatgctatgatcagttgatcattattaacaattacaaaaaatcttaatgaagtcttcatatattcatctcaagccacactggctcttactagaagaggatcacaacaggtaaagtatgtgatttctattctttaacaaactaatcagcttattgacaattaactataagatctgagtaaaaatggaccatatggcaatatcatgataccaccctatgtacgacccccaccttggagacccttcttcaaccttatttacaatgtaaggtcgaatgaagaagtgaatgatgaaaaattacctagtcacagcacccattgagcgtccccataagccaatcagagaaacatttccatctgcccttagatagttgaccactgctctcagatcatccttctgaaaacagcatacaatgttaaatagtctttcataataaaaaaatggaaacaaagcaaatggctgtaatgcatatgcaaattcacagtgaagtacaaacacaagcatttcatttctactgtgatgtaagaaatttattaaaaagaaatgaggatataagtatcctgccttaggcacatgacaaattttatattttctgccaacgatactccaacatacatgttacaaaaaataatttggactagttgataatactttttggattgaatttgtaatatgcaagtttgttttcttctaccccttttcaatggatatctttcatgtgttacctaccaataatc

SEQ ID NO: 6363 - DNA, 869 bp, Glycine max
acgccaagcttgcattgcctgcagcatcatcatcctctccaaatccttcagcaatcaaccgcatcaaattatgtgccaccttaatattaacaagatctccagcatgctcaaaaactttattcatggtctgcataaccataacaccagatattattagttatcaatgaatgtatgcaaaaaaaatgtaaaatcaatagtattgaggcaagtatttcagttacctgtataaaccaataattacttggtgcaaattgctcagcaagttccacacatcgagatgctatataagttttataatggtcatcactcatgctaatcatgtaatcaatcattctgtcaacaatcacttccacattggaggacttggtcattttgtataacagttcaaaagtttttcgtttcagactatcatctgggtcctgaatcacatacatcaaattttaatcagaattccaaaattgagcatgattagaagaaactatgcacaaaactttgtaaacaacagggggcattgtaatttttattttatttttatcgacagatgttaattgttagtttttttattagcaggagggattgaacctgcgacccttccctccttcccttctttcttaaccacccagctaacataatacatccggcgccattgtgattttatgtgataaacatcatcagggtacttatccacaattatatggacaatattatgccccatttcttgccaaaaaaatattaagcatacaaaattgaatagctcgtgaatatagcccatttcagggaccaattataataaatatctggttctcaaaactcagttctaattgctagtttagtaaatttcaaacataaatgaaccaaaattttagatg

SEQ ID NO: 6364 - DNA, 849 bp, Glycine max
aagcatgatcccaagtgagtaaacatcagatttgattcccagcatgcctgtttgctgatactcagggtcgatgtaacagaaagttccagcggttgatgtcatgcgatactgtgttactgtgtctgcgactttaggagggacaagccttgccaatcccacatcactgatcttgctcacatagttacggtcgagcaaaatgtttcccggttttaagtcacgatgcaccagtggttcgggctttgtctggtgtaggaaaaggagtccggtggcaatctccgcagcaattcggaatcttagttgccagggaagggctggtttgttgcctctccggaagaggcaatcatccaaacttccattagccatgtactcatacactaagcagccaaactctgggcatgctccaaggaggagaaccatgtttggatgccttatgcaacttagcacttcaacctgcatgcacccaatgtcaaattcattgattcaattcaactatagggtacaaatcatgtacttgtttttatatatagtcattttcatacctcctgctgaaactgtgaacgtccctgagctgcatctggttttaacacttttattgcaactggcgtgtggtctagttcagacctgtagactggtccataaccaccttcgccgatcttgagagagttggaaaagaattttgttgcttcttctatctcctctatggagtattttctgtacctgactggactatgtgaaaggatatccacgttcttcttcttatgctcagattctacacttattctcttttgtgctttcaactctgcattttttcgagatgtttctgctgacttcatggcagccatacatttt

SEQ ID NO: 6365 - DNA, 823 bp, Glycine max
aagataatttacatacaaatcatcatagtcattcatttatatatttcatgcattgaacaaattaaattatacttggctcgttcaactcctttaatcaaggaacttaattttcaattcatgttaaattcatttaactcaagaatcaagtttatcaaattaattaatgaattggatccactgagtcctacttagcacatgtggtttgttcagttctttattcaccatcatcagctgcaagcaaagatcccctcgcaacgaaacaaatatttcctaggtactggtatttttggtccgtatagtaattattgtaagacaatccttaaaggattgggttcgaatccggactgtataaccttaaaaaaaatatttcttcctaggtcctgtcaagatcaaatcagcttaaaaaaaatgttccttctaaacaaaattaaagctaattatccatcactgtagcgcatcattgtttgcgctaaattcgaatcaccactgtcactattcactaacaaagcctaccactagagtttccaagtgggcataaaaaataggataaaccataaacttttagattagagttagagcaatgtcgtgttcacaagcatcttttctacttatacctcatgggaaagtaaaacgagtggcttaaaacagtgccatccattacattacaggcaactggcatttatctactttatttatgcaatgcaactgacatttgtctcctcattatcaaatatcgagtggaaacgactatacaaagggattttaagcacaaatgcacacagaaatgttgactacaaatgcttgaggtctaagggaaaaaggt

SEQ ID NO: 6366 - DNA, 872 bp, Glycine max
ctctagagtcgacctgcagaaacatctctgaagggttgcattacataagagacacatattagacaactgcatgtgctcatttacatgaattgtctatttgtctttgattaacttggtatgtatgcctaagaatatgttacttgtacataggcaattgtacagtgtatggtggaaccctcccttcccaacccagctcattaattctaagctacctttgaatgagctcaatgttatcatcgtagaatcttgttcacccagatggaacttgtctcacgtaaacaatcgaaacaaacaacttatttctatttccataactcaaactttgctcagttgttacttacccaataaaacatttccacgtaagatgtgcaaggttacgtgacaaggctacttaggctcaaaatattggtccacataacttgtcaattttaataaaataaaataaaataggttgaaagttaatgagattagatcaatatagtatataataaatggtacaaatgtgaccgaaacccacccaaatttaaataaaagatgggataggggaaagagcactgtctaactattttcttggtagatatggggacaagaaaaaaataaaagctcaaaagaaataacaattttgttggagatgcaattagccacgtttcagggaagttggttgtgcacaggatgaagtttgagaaaactgaagaaaatgaaaacatgttttggttccattaaggttgaggaacgagtccttttcttgcaccacttttcccaggtttggggtgttcattagctgctttatgtccatcgatatccttatccttattggttttaattgagcaatgcctcttttctaggaagctgcttcttttgttgacccctcg

SEQ ID NO: 6367 - DNA, 877 bp, Glycine max
ttggtaataagattttgtcttaattcatgaatatcctccgtggttgagtgttgtagacccgccagatagcgtttacttaggattaagcaatgatagaaaagccaacaaagataatagcagcagaagctaacgaccaaattgttgtaaaaattactagaacataagtagagaaaatggtttccctgatgtgtgtcagatgataaggatttttaaagatcatttcaccataccatacatatgaatttttagacagaaaactatcgagagataatataaaatataaacataaaaatgtaaaaaatacatgttttcatattttatttttaaaatatcttgtacattacaaggataacagggtgatgagtgtctcttttcaatattaaaaattagtttttacgtaagaaaccaatgatataaagcagatatgctaaccgaaattatatttttagttcttgtaaaagtaatttgcctcattataatcaatgttcaagattaaaacgcccttattatgtaaactgtctggacaaagaaattaagtgttttaaagtttaatttctatgagtaacattaatttaacatccaagtcgctttggccgagtggttaagggcgtgtgcctgctaagtacatggggtttccccgcgagagttcgaatctctcaggcgacgagggtttttacatttttcaatagccaatattttatttgcttttattcttcattcacaattgagtaacgataaacatatacccacactttttaaatacctaactaatatctataatttctttttatctcttttttcatgtcacataataatacctatgatatctaagggtttttttctctctctcattaaggggataatatatattggggga

SEQ ID NO: 6368 - DNA, 851 bp, Glycine max
attgaacattttcgggatgtccaacatcagggttggataggctccgaaaccatattaaaaatgggttaaagtctaactcaacccctaaaagccaactctagaggggaggattgcccaaacctagtaagtagtagtttggccatagtccatgctaatgtagggcatcttaacaaacaaggtcaacggtattggaaacttctactgactctttaatagatattaaacattacacaaatgatgtctattcattctttttgtaatcacattgaatgctataccactttatttcaattgtaaggaagatttacataacaagaaaataaaatataaacattattccaattccaattcatacattaatgcatcattttatttgtaagaatagacaaaataaaagggttagcctatctaataaaaaccttgctttcctggcatggcactctgcatttaatggaaatttcagcaccttttgtatctttagtcattgtgttcaaataatttattcattcttaattacttgtgtggaccaaggaagctcaaggggggaggactgccaaagtcttattagatgtactgataccatattcctaaccaatgtagcaaatcttaacaatttcttcaacataaacacaaatggaatttaattgcaagaatgatctcactaatcactaggactttagtgggcaaagcatgttccctcaaaggggataaaaacaaagaggtatatgaatgatggtgaggacatccagacgaaatttataagggactcaaacattaaatatacagacaaaattagagttcacaaaaaaaaaaaatacacaaaccttggcagcctcagctacatatctgga

SEQ ID NO: 6369 - DNA, 869 bp, Glycine max
accccatcccatatgtgggataccttgtgcccactatctagtaatcttttgcgcacgattgacggaagaaaacctcctgtgacttgaatatgtgagaagtatttttagggtaaaatgattatataactaaccaacaacttccctcgcatgacaagtagcaatgagtttggcggaaaaagatcttcattttcttaatccactttttcaaataactagcggtttaacagtgaattgtgttttattaatatattttttgtctattaattagaaattaaataataaggtaaacatcacacgcttactaactaactaactatatatatatatatagcttttgtctatagataatataaatatcacacgtttatactaacagaatgatatatatcatattaacaaattattctgttgatatagaatgttgatatatattatatgtattaaatatgacaatacacatcacactaataatataaactcattagtgtttattaaaaaagttaaatttcttttagacaattattatactaataaagacaatcctcatgcttgacaatttgtctaatggtaaataattaattgagttaaatatgtttagttttgatcataaaaatatcatgaattttaattttaattagttcctacaatttttttttatatatttttagtttacatgcatttaccaaaagtcattccgtcaaagaaaaaaaaaaaacaaaagtcacaagaagtttgtataatttgtacagggtttctagatatatagttcaaactttgttatcactatttgttgtagatattagctgatgatattcagttacaaatttagataaatacatttatttgaaattcgatcagttatacattta

SEQ ID NO: 6370 - DNA, 846 bp, Glycine max
agtggaccctgtaggctaataaagtctacaattgcattcatattttgtgtgaaaacattaaattcagctcttctgttttagtcttcttaggccttggttttgaagaaatcttaattgaaatgttaagtcaaaataatcacacataaaccatgatggttgatgagcaagttgtatatggtgaggaagctgagaaataaagaaaaagaaacataggaatgtggttagatggaacaaaccaatgaaatttagtagggaaacacagatccattaaattggctggtagcatgtggatatattgaaagccttgtatagttgtattaattaaaatgaacaatagcagcagtgttaacccccatttatggccatttaagtatttgattaccactctacatctgttacagatctgtgtcaacaacacttttctttaattttttctcataataatttccaaacaccatcttaacacattaacacattccaaaaggggttcttcccttacactttatgccaaaacactataccccaccaattcatggagccagggattaggtcacaagtcgtaccaattcaatttttttataacataagattttcatactcagcatcattatgtcccaacattaacaatcacatttagctgtcaattgtaactcagctctaaaaacaccttcaaggtaccacaccaatgaataccatcacaacaaccaacataacagtaccaacaacaaacacaacacaaaatttgttggaaaaatttaaaacaagacatgatgatgatgatgaagaacttgcctgaagagcacgggcgaaaaggccggacaccacctttgggcagcatgcacgcca

SEQ ID NO: 6371 - DNA, 874 bp, Glycine max
ctctagagtcgacctgcagaagaatcgcaagatttgtgtgcaacatgcgattaacatgattcattgtgattcgtgcaattcatgtgcgattcaagcacaaaatcgattgaatctacaattcgtattgccaagctgaagaatcataacgtattgtattgcgaatcatacgatactgataaccatgttgttagttatcctcagtttcatctcatcacatatagaattgaatttcttgctgggattggtcttaaatttgtgttttggcatttagttcttcatatattgtcagcccttaatatatattgattatttatccatgtgtgtttataccatagggattggaatattggaacatattgatttttaaaatagagaagttaaagccttgtcttcttttttatcatctgcttatgtattaattttagtttagatttctagaagatttgtttttcttatcttttataaaactttgtcttactttaaattccttcaagtttgcaaacttatttgaactttgcatttttcaatcttttgcaaagatacaagttatctaagtggatgccatttcttttactattttttcataaacaatcaactgcaagtactctgagtgagagttttcatttgaaattccctgaagagctgaggtactcatagctttgggttactgagcttgccagggagcaaatggcatggaagctagcagttaactttgtatcaggggttcaaatgttttagtccactcccttggtccttttttgtactatgttctactcctaattgcatctttcaacagaatctatctctcttctgcatgtcatagtaatcaatagggtgctacagcaggatagcagagcatcctttgtgccactat

SEQ ID NO: 6372 - DNA, 843 bp, Glycine max
  misc_feature (814)..(814): n is a, c, g, or t
gtatttgtcggttccaagagcaatgctaatcttagtaatgatgtgaagatgaagcttcatggttatcaccgaattgctactcagggtccttgccatgaacctcagccaatggctctgaagttctctgctcgagcaaagtggtaattgattaatgattgtcctgcttatttatctccaaatacttagaaaaagaaaaaaattataaccatttccctctacctctagttttggtttgagttgcttagagttacagttacttcattagattctttgatgtagttaactggatcattctttttgtgtaaggattgcttggcgacagcttgggattatgagtccagaggaagctatggagcaatatatcagccttctatcagaaaacattcctgattggatggtagaaaatccttatgtaagtatatctaaaaatactattcggttactcacccttttctaaataagataagatatatattttatttgatctctttttggtcagttgtgctttaacttgatgaacaagagaaattttatcctttttctcaattgtcctgtctgtactggaaggaagcccatgccttccctgattcccaatttacccctctgtgtggtggagggatgatttaatttctttattaaatctattagatacagccttgaagctttatattaattatccagagatgaatttttgtattacggatgctactatgggtagaatttttatatttctttttattacaggataatgctaaaccggcatctgcaaaactaaccttatgatttgaagcatagctattagctaccatggcanagaagctgaaattataaggtataccatat

SEQ ID NO: 6373 - DNA, 867 bp, Glycine max
agccttctgagaaagaatggcatttagtcttgttatgtaatcatccagctgattccctggttgatctgcttcaaccaagaggttcatctcctgcatgtcaagtgcagataaaaatatgaatatgagaaatggacttcgcacccttgggaggatgcagtggcaaggatattattcaggaattcgtttttcacaattctagacctgttcattattcctagaatgaataacactggaaccatggacaacattcagtaaaagatttcatgaaattgaagtttggtgtgttatgtacttgttgaaagtatgcacacaattcttgatcatgctatttatcaaattaagtactcacatttgtattcgcattcaattgtttcaggttacttgctacatacaactagtcaattgtttctaaggttgggacacatggcccagtgtccagttaccaaaaagagtaaaggaaaagaaagaacaaaaaaagagataatttaaatacctctctaacaatgttcatggtctcctctacttgtgtccggtgagcatttacaaggtcctcttcttcctgaaataatgacatgcttttagtaaatatgagccctggattttttatacaattattatctcagtagccgacaacttacctgtaaaagggcatttaaatcatcctctgcatgtgtggtttgaggttcaaattttgggaggtccttccatttgatctgacccactgggtttcttcaatttgtcatctgtcgtagcatataactccatctttccatttttcttcaaggggggggttcaccctgctcgtaatactcttcagaagggctaaaatcatcccattcattttattaggccatcatttgttgtgcg

SEQ ID NO: 6374 - DNA, 839 bp, Glycine max
  misc_feature (563)..(600): n is a, c, g, or t
  misc_feature (603)..(603): n is a, c, g, or t
agggtagtcactttaagttggaacattgcttaattgaatggttgaacaaaaaagtatatcatgctatccacaataatattttgaaagagaatgactcatttgttgtctgggagtagttttaaagtgcctaccaaagaattaagtgttccattttttgttactgaaagtcatctaccaatttgtaacttaacacttcaatgcatgcattaatttttactgtttattctataaattatgattatgatatccaattatccatatcctaagcctcatgtcaatctcctatgttgatcagattgaagatgagtaagctttggctaattagctggtataacaggttattctgttgccggctaaaccaagccatgcaaaatatggttttcgcttgcttgtatataaccagtaggatccccatcaagttattttggtagacaaaagcttaggggaggagagcttgcctcattccaaggtctggacataccacaagacttgcggagtgcgtaaaatgttagctaacagttaatagatgaccaactaatgaaggattatcacaagtatatatnnnnnnnnnnnnnnnnnnnnnnnnnnnnnnnnnnnnnnttncctgcatcctagcatcttgtgactttgaggcaattaagaacttctattttggctagttttcctttctgattgcttaaattgtgaaccatcaatttgtgtgtgggtctgacttttggtcatacaaggctatacatcaatgaaggagtttgctaaattcatctgatgtattattatgaatgattacgacaaacttttgtttttcctttagaaattcttagaattatgagcattattct

SEQ ID NO: 6375 - DNA, 824 bp, Glycine max
ttgcatgcctgtcggaggcgagtaagctttgagtcgcgatatggaacatgagatgctttcccctcactcaattttccaataacctttaaattgaaaccataacatcaagactttcaggaggcaggttttgtgatctttcacaaaaatataaatcgtaaattaactaactggtgatcccaggttcccacaatatgtcataactcataacaaaatttcttcatagccaacaaatacaggaatacaagacacctactgttccaagtgtcagaagacttttgtttatgtaagatccttcttttcttcttaatccagtggtttcagttttcgagctctcagatccagcaagatcgatcaagttctaatcaaagaaagcaagcaaaaaattgagaatagtcacgcaataatgtgtttgagtgtgttgtcagaaaagttcataataatgttcacatacaagctgagagaagatgactccatcataatcttcaccatgggcactgctttcaatcatctgcaaatgtattggatagcaataataatacaggttagaagtgaaacaaaaatggcttaaaatggtccaggaaaaaaaaatccaaatatatgagctgagcaaacattaaacttttaaccagcatacagaaaacttagttaaacatctaagcagaatatacgcatgcaacttagccattcataaacctaaggcctcaggctgtgttgtaaataatttttctttgacaattggatcttgtgtacaaaaagttgcttcatactaaattttaaaactaaatttccagaatgcttacaaggtaaaaatgtgtgacttcgct

SEQ ID NO: 6376 - DNA, 779 bp, Glycine max
atgaatgaacataactgatccaaattgtttgttcttcaaagtcactttagtttgataacgatcacgagtacacattatttcctttgtcacagttgcagtcttatccgagtgttacatttctgtccaacctcaacgatttttgcagctaagcaattcaatagtctaaaagtgatatatctttgttgattcatatagaatatgacaagttcaaagagataaatttggtgactagttcagtttcccgtgaaaaaagagagagaatgatttagagagcttactaattttttcacaccaagtcaagattgtaaaatagtttagttcatatatcatatttgaagtaaaaaataatcaatcaaccgagtgaatccgaaccaatttaattgttctatgtttgatttggattgtcgggattatcgggtcaatccaattcaatgaaatgaattcctatagttggtatctattgaaggccttggaaagtctatggccactcattacagtttggccaatggtttcattcatactttaatctgctttcctgtaccaaccaacctcaggtgacacatctcatggagccaacttctggaaagaagaagtaagcgaaaaaatacttaacatcgctacagacttcactacatgtatcatttggaggcatgggaattaacacggttaaacaaaccagaggaattgaggggtaaggggagggggttgtgaaaggagtctagaagggttacaaagtgaaccaggtgatgaggggtttgtgggtaaggttggtgcttact

SEQ ID NO: 6377 - DNA, 873 bp, Glycine max
ataaaagaactgctgtaaagtcttctttgtcgtcctgtccaacagttcaaaataactatagttgttaaagtttgataaaaagaccaatgggcaatggtgaaacatactatcaagattttagaaagtttcacgttttatgagaatacaaatctgggtcagatacatggattaaataataccattgtgttcatgccatagaaaataaagcatactaaattcaggtaccaggaaagaacatacatgtgtgtcgttgtcaagaacggttgttgtagtagcaaattgacattcagctctatcaacttcattataatcagaatcctttagtacggcttcatccaaaaaacccaaaaaaaggacacagtaaatgttaatgtgttccttatcctcggaatagataacaacgtataaatccaaagcttcaacattacccgcacaaaaatattttgaagcctgatcagtgcttgggtagattttgcatgattgggttgtaacctcatttggcttcattattaaaaattgctcctgaaccatgtttacaagcaaacaagaaaaaacataatagaagacctatggaagtatagaaaaaaaaaggggcaaaaaacaaacttctagcatatgttttagcataatacctccatcagggtgatatccttggagcaattaaactgcaagacaacacaatatagcaaagctaaaactacagcttgttggaccctaaggaaaatgactgcaatgcatgcctcaaatatatttgaacctaattttgtaaccataataataaaactaaagcatcaggagtagcatgcatctgttaaattcctattcatgtcatgcagtcaattcaactaactagagataatttaaccaaacatt

SEQ ID NO: 6378 - DNA, 785 bp, Glycine max
  misc_feature (775)..(775): n is a, c, g, or t
aaaataaatagcttttgtaaagatctactaaaacaaatgaacatgttgagaaaaatgttgtcaatagagaaagatcagagtcatgtagtaatcttggtcttgggcctattgaacccctacaaaacgagcataatccacccacctgccaaggaaaaaaatagagaaaatgaaccactggcaacaagtaaagctccctttagaagtaatcataaaaggcatgaaatttcttacaataatgaacccaaatatgtattgccagtccgcacagcaaaacaaagtgcactaaggataagtttgtgctggtgcagcaaaggttccaaaagcctctgttcaataattccagcaagtacttgatacctgtcagcaaaatcagattcttagtaaagaactaaagattataaacaacaatggatatacagttgctggagacatgaacaggctagagcatttttcaatgtggtaaaagtaataatattaataacgtacttcacatggcaaaagataacagttcataaatcatgatttttctttagaaaattatgcaacaaatatcacataataaacattttaaaaatgtgcaaataccatctacaataacttgcattttgtaacatctgtttgacttttccagtagctttagttgtttatcacataataaacattttaaaaaagaaaagtgtgtcctttctctccaagcaattcatcatgatatactgagatgcttgtccataatcagatgacaatgagttaacccattataaacaatgacaagccnctgacgtaaa

SEQ ID NO: 6379 - DNA, 821 bp, Glycine max
aactggttgacggagttgtagcttctcatccgtctggtgttgtgcctgtacatggttctgattctaattgggatggtgcaagttgtagagaggttgctggtgctggcagagatgaggatcttcccccacccaagccaacagaagaaaaaactgtgcagaagattgaagctttgtgtcagcttattgctgagaagggtgctgatatcgaagataaaatttgtcaagatgaatttcagaatcctgaatatgcatttttcattggtggagacccgggaactgaagctgcaattgctcacacttatttcctgtggatgaagaagaaatataatttggatactcgatggcatgaaaagagaagacaatcagatatagtatactcttcaggggaacagtattgtctgcatgttacaaccgtgagtgccgattctgacatggaaatggaaggttagttttatttgttactttatgattctggcattaaaaactgatatttaacaattttcacgtttaggtattaaattatggtatctcttattaagtgtgctctctgctctctgctgttatatattcttaatatgtaagtctttatagttgtattggatttggatgctctaaagtgcaggatgcacttttagaaagtaattatggtatctcttattaagtgtgctctctgctctctcctgttatatattcttaatatgtaagtctttatagttgtattggatttggatgctctaaagtgcagggtgcacttttataaataccagtacttggataacaatcatggaaatgtgagaacccaaatctttattttgcatcac

SEQ ID NO: 6380 - DNA, 828 bp, Glycine max
ccagcttgcagtctgcaggtgcaaaagtagtgcaagtttgaaatttaatactgaaaaggagatatttgatttcctagacttcccttgtcttgaaccacatgaaagaaatctctaagtatacaaatggttagtaagaaatctcttgcttgctctctgcattcaaccttttagaatatgttgatgcatttagcaaatggcttttcgttttattggcagggtgctgctttgtaaataaatatacttgtaggatacaattcccttatctgatttaatatatattttttgtacaaaaaatggctctataagatgagagcaatttttctcgtaaaaaaaaaaaatgagcaacttttctgtaggctttgtttaaaatgcattataagttaatcgtcatgactaacatgagttgaaatttaacacggtgatcacaaaaggttggaacaaaaaagctgagcttactaattcagtggctaaatattttttaaattcaatgacttaatttagtcatggtttaaacaggaacaaaatgaaacataaatggcagctaataggggtcaacaacgatacttaaaaatgtgattatacgattcgtcacacggatcctgtccattgtttttttaatgaaatgtaaattagtgcccatttgatttagaacagagcaaaattaactatgttgggatatattttaaaccggtggttgtaattgacatatgtgggtaaatttatttgaatcacctttatgttgaaattatgttttttgttggacagtgtaaaaaatgatttttccattttaaaacacaggggaaaaacaaaactagtcgcaagtcatct

SEQ ID NO: 6381 - DNA, 831 bp, Glycine max
  misc_feature (592)..(593): n is a, c, g, or t
aactcatgaaaggatatgcagcccaagagctccaagccaatgtcacacacacaacaaccactttcactatgacattgtccttcaacatacaaattaatgcaccgacgtccagagggaacaagcaataacccaacagactcagactctgaaagaaaataatgtgtccaccctgaaattttgaagagatgatgaagacagtcaaatatttggcctcattcatcaaagtatacttttgagaatggtcaggtccaccacccttcagcatcacacaaaaagtttgacgctcaaaatatgagtagatgaagagagagagaaagaggctattaccagaagaagtacattcaatgtcaaaattacagcgccagcagcaagtaaagcaaatgcaacagcaaaaacctcagactgagacacaatcagatagaaagatgttagaaaaaaatatggcattcaccaaattcacttaattatacaacacatgcaaactacaaaatccagtacacaaggttcccacctggtgaggtttggggaaggtagatgtacacaaccttatttccgagtctatttctaggggattcaaacccataatagtctnnctaggtcaccaggcagcaaccttaccattgcaccaagactcactctcatcatgcaaactactatgcaggcaaaaaaaagagtatagactagagagccaccaaagtgagtagaacatagtacaaaggaccaagtagtggactaagaaatttgaacccctgatatatttagtttacacacacagtaaccatcaatctaggagcaataagaatatagtaatgaagccaaaaaaaaaaagat

SEQ ID NO: 6382 - DNA, 826 bp, Glycine max
ttcgccagcttgcatgcctgcaggcacgaattcatcctaagaacaatgtataaataccttagcaatgagtaaacaaagggagaagaatttcagaccaattttatttagcatagaaaggaggtccttgtcctcgaatacaaggaatttatactctgttcatatcagtgtctaccatgattactcttaagagaaatattacaagcattactagttttgttctgtactagatcgtggacattgggcaataactatccggtacccacttaagagtaagagatctcctcgtggaaattttcagtgagaatactcttgtgagcattttgcatttacgatttgccatctccaatttaatcttcgttcgaaaaaatcttgaagttaattttaccttgacgcatctgactcctctactttggtttttttgttcatgtaaatgaaattgaggaaaaagactgatgaatatgacgtataatctaatcctacttcctactaacacgcaatcaatttatcgtcaaggctcaaataatttctgctgcaagcgaattatggttgcggttctctgtttggcgcttacttatagttatgtgagtcaaagattttgccaaaaaaaaaaaaaaatccttctataatcaatcttccctacgcagttttacatatgcacactggacaaaaaatcttacctacgccaacggatgggaagttcaataggagtagacattaaaattgaataatcatacacagaccagttcctctttaacagagagatgcagaattatttgataaatgtgcctacaactacaacttaataaccataattttacaagcgaat

SEQ ID NO: 6383 - DNA, 861 bp, Glycine max
agtattcataatcacctttgatgagcactcgtaagagtactgcatgagattccactagaagaactacattgctttccttgtggctaattgcattttcaaaatctttgagagagtaaggagacaaccgcaacagtttaccaaaagacataaaaaaatcccaaaccattaagagatcccctacacaataaattggaacattaaagtctcttgatggagaaggacgactactgaaaacaggatcatctggactaggcttcactaatagatcatcaattggatatttgattgactcttcctgaacataatagatttgaaacaacaaaatcataaatttgtttaacaaaatcagaaattataatatttgagtgttcttgtactcttttctttcttactttgttttttaggaaacataaaggaagctgaaacaaccacctccctatttctactttacctcattttttctttttttggtgcagaccacaagcccattgttgaagaaaaactttctccttaactcctctggaatgtcagtagagattccatgtttttttgccagtttatcatgtaaaacccaaggagcatttcgatatgtagatttgcgaataaaagacttcaaaatatttctactaaaacatggcttcttctgtaccaaatcttgagagctgacttctcctctttcaataatattattgttttcatcaagccaagctaccacatagcggacattttcagcatcttcctgcatcactttcaatactttacatgggacgtactctgtcattctttttttcatacaattgagcgcccacaaacaactgtccctggcacttttcagcaataaatcagccagatccttcaagg

SEQ ID NO: 6384 - DNA, 854 bp, Glycine max
aactagagagcaaggaaagtacaaccggtgagcggtcgttgtggactcaatgtcaatcattagctgacatgaagttcacttatgtagtttcatgtcaacaatatagtattcataagcgatctggtgatcccagggcaaaagaaattttaaagcttatgattaagtatgtctctcaaattaacctgctcactttgttatagcttatgcaaacactgtcctataacattcagcactaatgttatgattgcaggtacccatctcttcgagttgcttacattgatgaggttgaagagcatagcaaaggctcatcccgaaaaacagataaggtttattattcagctctagtgaaagctgcattaccagcaaaatcaaatgattcatctgaagcagttcagagtttagaccaggtactgttcatagaccattcttggaattaacaaaagtcaatagatttagatttgatgaaagtcctgcacattattatattgtaaagcctagttgtgaaagctaaatactgagtaaaaaaccaaaattgatatagtcacacaagtgacagaccatttctacaacaaaagaatcaggcacatcctgaggcatcttttctgaaaaaatagaaaaatgatttttcctgtatttttgcaattagatattgtgtaaagtaatgaaaaaattctagatggataggctcttctcaaatatatccagcactatgatatattctttacagttgcaacttgcaaaggttttcagcttgttgattagttgttttggtgtaggtaatttacaagataaagcttccaggacctgcaatattgggtgagggggagccaggaaatcaaaaccatgccatattt

SEQ ID NO: 6385 - DNA, 847 bp, Glycine max
acaaaatgtatgttcttgtttccaaaatgtcactgttctttcttaaataactggatcatagttattagtatcttacgatttgatgcaatttggctatctaccaatacgtatcttaagatgaatcttaaaagactttgtattttacgattcacaagaatgaatcatgtgaatcttacatctcacaagattcaaggattcgttatttttttagttttctttcaccaattttcatgaaaaaattaaaagttatataatcctaaattattaaattaaaagaaattgaatcttttaaacttatcctatttgattactccactacttttttagttgctcactcatttaatgcatgtactctatttagctaattgcttcatttccattatgctaaaataaaggcttcacaaaacatctcatgctcctagagttatgttttttttagttattgatcatgaatatgtgctttaatagatttttgtttgttgcatatgctatgttttttattgatcatgaatcttatgattcacgattcagaaaatgatccttccgattcacgattcagaaaatgatccttccgattcacgatttgaatcctgactcaacaaccatgttaatggattacattttttttttcagtggttacatgtctccagaatatgcaatgcgtggacagttctctgtgaaatcagatgtgttcagctttggtgtcttagttttggagattgtgagtggcaagaagaacactgagttttatcaatcgaatcatgctgatgaccttttaagccatgtgagtatacacaggagtaatttcctttctacaatggttagctacaaactattcagtgggtga

SEQ ID NO: 6386 - DNA, 818 bp, Glycine max
gggtgaggtggctagatgagatgtttgaggggaagggaagagagtgtagggatttggtgtgtagacaaaagaaagatttcaccaagtttgatagtgtcaataacactattgatattgcgagttgtagttcctgtgtgggacggacaaggcccaaccctattgaactattgggaataataggatttgacaagcccaaccaaaaaaataggttaataagaatttaaaatgttttgttccatctttttttatctgcacattttgtcccatctggtttagaaatctatatactaacaaaatcttaagcaagaaagagagaatttgtggcttggctagtatctttcatgaaacgtgtcattgaaagcacaacattgtttttttttttttttttactactaatcgattcttttatctcctaaaccaacatgaaaatattgaaaaattatttgcattaaaaatggggaaaaattgtgaaattatgtgcaagcatcggcatgcattttctttcaacccaagtttcacgtggacatggtctaacatttattcttcaaagtggatcattgaaaaaggctctaatatagaggattgggatggaagaataaccagatcccaaaaagtgtggaggcaaaaagatatttgtattcatttgtgaaccaataaacaaggaaatgaaggttgaggaatttattaatcctatgactcgcttttgaacaccgaaagattgacaatttttttcccaaattggatgatagatattattcaaactattcccaaaaatcagtattcgtgtagagacattgtgggacgggaactaaattttg

SEQ ID NO: 6387 - DNA, 856 bp, Glycine max
atagtatcaaaaataagatcattgttaactaactgaattacacttctgttcaatagtaacaaaacatggcaagcatctaaaaccaaataaatttgaagtccagtggaaacaaaataccaaacagccgagataacattgtgatgtgttggtgggatagcacttcaggtactataggtttcttcctaaaaaaaaaaatttcaacatagcagcatgtattttctgggtataaaagatggtaataatctacgttaaccacatcaaaaatggtagcccaagaactagaaagcagaaacatgttccacataaacagaatggcaaagcacaagccgccaccattggaggataacttgtcttagttgtacttttcctcctttctttataattcttttttttaatttatgaggaaaacaatcaattacaagcttggagtgaagcaggtgtgtaaatactgaaggcaatctaaagtaactatcgatggcctttaagaaaagaatgactacaacacaattatccagaacattaacagaaaagcccaatcaaagttttggagaatttgatctaaattacaatttttggaacgaaccagcatggaaaagttcctagaagaggcaacattgagaattgaagcagtgcttccttttgcacctctttcaattgttggtccaagtgatctccaatggttattagatacgagagagagaacatcctcttatggtcttaaaagttctcaaactcaatggaaagaacatgggtttgtactctatatttctcatttaatgcattttaaaaacacaaattattcatgaacaaagaaaaaaaaaacatcttctatatagggataacttttttaccagta

SEQ ID NO: 6388 - DNA, 785 bp, Glycine max
agcgcgttggggctctctttcgttatcaccaccggcggctttggcttgttctttgaccctggcggcctgccacgcggccgccgcccgccgctgagggtctgctcttcgccgtcgcgctcgttggtgtttgcgtcgtcctcgagaaccgcgttaacgttggtgttactgttcccactgttggtgggagtaccgttgttgtcaccgttgtcttgttcactgggcttcaccgtcgcgctcccggcccaccaacgattcgccatcaagacagcttctttcttgcttgctaagatcaaatccagcttgaacccaaaatagtgagtgggtttttgattttgcactgagcaaatatataagacagaagagggagttccagaaaagagtgaaaaggaagcgttattgaaatgatgtactctgagttgggttggggctagctatagctattggagtaaatgcttagagttagttcaaaggcgtgaggtttgaactctgctctctgactctggcgttttgagaagactttttttgctttggttagaatggggtgtgtctgggtaattggttagcgttttctgcaaaaattcccttttttgtctcccggagaagcggttcaaagttttcgacttcccaaactatactaaagcggggccagttccaaacaaacaagactaagaccaagttgtgcaaagatatcattacaaggatgggctccacattgacttgataggaatttcttttttttttttttgctacaagagaagatatgagtattttatactactatttta

SEQ ID NO: 6389 - DNA, 853 bp, Glycine max
agcaggttctacccttgcatttgctgtcaagggagatgcagggaatgaccatatggatttgcatacacttaaaagtccagaagcatcaaataaactcacaagtgcaatggctaaaagaaaaacagcatacaagatacttgtatcaaagaagcaatcttgtattcttctataggaatttcctataggaatggttctagccctttcttctttaacacaagcataccgtatgtttgtttccttttagccattgtgagtttgtttgatgcttctgaacttttaaacatatgcaaatccatatggtctttcacattatttctcttggcagcaggagcaaggttagaatctgttgaagcaaatctttttccaacccttacgttgtaaatttcttccaatgcttctacctcatcatcatcacctttttccagcccaactgctacatcatttacaaccttatttttctcagaagcttccttgattttgagtttgatttcaagtgggagtttttgacatgcaccaaatcccccttcacccctatttagtgtctcatagctctagttattcaattgaaaaactttaaaaaattaaaaaattaaaaaacacagaaacccaaaatggtgttaaaagggacgaattccattttcttccttgatgttgcaattgcacctgtgtatgtgcacaattgttgtgatctggctgcaaataagagacgaatttgattttcttctctaatgctgcaaatgggtctacgtatgcgcgcaactactacaaactcgtcacaaatagtggtcaaccccaccacttaccaactcatgccacacccattattaaagcacacatggtcaaaaaacgctcc

SEQ ID NO: 6390 - DNA, 895 bp, Glycine max
caaaatttcagctaatgcccacgcaattccaattgagattatgattgcaaatcgatcaactcctcttgatttcattttcaggcattggggaatgtacggcaaggccattcatttaacataagtagaaatatcaatttaaaattttagtttattttgatatataatatacactgataacaagggtaaatgacttcttacattaccgctagtttagtattcttaaattttattcaagagtcggtcaaaccaagtgaaattatgcattgagcaatgtccagcagaatcatatatattttttgatttggatcatagatatcctctataggagacaatcttattcaagccaacaacatgttggaggtagctcttccatcatgatttttttttcatacacaagagtcgaacttgagaactttaagaaaatttaaacatataccagccacttgaaccaacagttggtagaagcatatatattaaatagcaaggaattttggataatatattttaaaaattggagcttatactttttgcctcagtatttggtaaagaaagcaacatacctgggacacgatgacaaggataagaaatgcagggagaccaatatcaatgcaatctagcatctacaagaatcaaaaaacaattagtaaacaactaataatcagatgaaagagatatgttaccaatatggataagaaaggagcaatgcatgtactcttggaaatgctaataggaagagtcctaggccagtaagagtgacaaggggaaccacactaagggggctgaggcacctgcaatatcagtatatactatatagttaataacttaatattagtgcatttttctattctaaaacttagctgattttttcaagaagcaaattgcactattacgatca

SEQ ID NO: 6391 - DNA, 792 bp, Glycine max
aaaaaagaactgcttcagaacctgtcctgccagttccaaaatctaaaggaaactatttcgacgacgatgacgacgattgggggaggaagccttcctcatccacagcatcaaaggacaaagacaggtacaagaatggtttcagcaactctggggggctagagaaccaaagtgttcaggagctggaaaactatgcagtgtacaagtctgaggagacaacaaagagtgtcaacaattgtttgaggattgctgaggacatcagaggggatgccacaaggacccttgacatgttgcaccagcagggtgagcagataaccaggactcacaatatggttgttgatactgagaaggatttgagccgggtatgagaatctggtctaatttctatcttcaactttttgttcaaagtttaggttatttttagtgatatcatgaaaagtttatttatattctagtaagaagcattttggtaacatttcaatgtcctttaccattttcaacttggactaaacttaaatacagataatcaaaattggagtttcacctcgaatagcctatactaatctataatacatactttactacatgcattactaggtaaaacacaaattatgattggagaataacacccaaaacacctagaaaactgcatctaagctttgtcctttgtatgtattaaaactatccagccttgtttcccttctgtggcattttgaatatacttttgctgataatgatgaacatcttaaatagatattgggtttcccagtagagcataggttactttgctccata

SEQ ID NO: 6392 - DNA, 867 bp, Glycine max
gccaagcttgcatgcctgcagacacccattttgtaattaagtataatgaagatgaacaattacaaaatccagaagattctagcaagttgggacgtggggacactaggaggaagaattctcggaattgattgctacaatactagagttaatttagagaacaatgataatttccacatagattggtctgagaagtacctgtagcagcattgatgctttcgcacacaagaccccacctccaaatgcgggaagcattgatgtattgtaatgggaactgaaaaacttgttgggagatgagtttatgcctatggtcacatcttcaaccccatcattacccatcaatgaccaaccatcatccacaaacccgttgacagcatcattgaaccctctaaataaattttaaaaaaattattggtcaataaggattgatgaagatagagtgattaagcaaatgcccaactatgcaaccaccaaatatgaaagggccttacttgcaaagcctttgactaaatgtcctcaagacagcaggctgacgacccccaccatactgaacttctccacttgattcttgtgcaatttgtcttacatttcgcaaggcctgtacaataatttttgaaatttaaatcaacaatttttgacatggtcaaacatctaatgcagtgttacaagaaatctcacagcagtagtcaatttctgagccaagaattttggtgattcatagaggggtctaagtacttcaggaacactccaaacctacatcaaaaacgaagttaatatacttaggaagaaggagttcaaagatatggaaatttacaaaatgatttgaaatagcttgatcttcctttacatctaaatcaacatgatcaacaa

SEQ ID NO: 6393 - DNA, 837 bp, Glycine max
aagggatgggattttgtctgaggctcaatggcttcttgatacaggtcttcatccaaactccaattctgcaacaaaagcaattggttacagacaagtatacctttatagtttctatattacatttcacttttactatctgcaaatttcagatgatgaaatatatctggttgaacgatctgtatattgtgtacagcaagaagttctttatgccttaagaaatatttttggttgaaattatagtataattttcagctaaaatagatttttgttccctcattttgttttttagtttcagtttggtttcctaagtttaaaaagtttcactttagtcccttaaagtgcctattcaacaaaattggtcattttgttagatttctgcattgatggtgttaattttggttgacgtggtatctctcacagattgtcacgtgtcaccaagttgaccaaattagtgtgtgataaactgacaaaatgatcaacttggtctaacagagacactttaacgttactgaagtgaaacttttaaacttaggggatcatattgaaaacaaaaattaaaatgagggaaccaaactctcttagcctataatgttccaagtgtagtataactccaattctccccttttttaatgtttaagtataatataaaattatagttaaaatttggatgtatattgtaatgatagattgggtaatagcgatttaaaatagttgatggcctaaagaatgtctattaactagatcattatattttctatataaatagttgaaatgaaattacttatattttggatatgtgattcacttctttcaggccatggagtactaccaagatgt

SEQ ID NO: 6394 - DNA, 828 bp, Glycine max
aggtcagaatccattatttagcgtaccttttgctatttctccccctctttatttctttttcatgtttctatccacgtttatctttttctgaactaaacccattattactttacgacatttaaaggaaataaaacgaaaaaaatatcttaactaaaaaataataactttttatttttatttgataaaaaataacttttttttgaatccattacttatattaatatattttatatatattatttgagtttcagtattttataatatcatgtttacatatgctatgtcacttttttaaatgatttttaaaaaaatgtgtttgatttaaaattgataaaaatttaatacatttttttaaaatattattagcaatttttttaatataatttaatttaaaagttcaaaaaatatataaatattaataaaataataactacaaaaatcaaattgaatcaaactaataaactattaattttatttgatttagattttattttaaataaaaattaaaccaaattaaaccaaattaaatcttatatgttttttaagtttaatttaaatgacttcttcataaaaaaaaaattaaatcaaatcgagccacaaactctctcataattatccccctcaaatacgaaaaaggcaaagagagaaaagtattcgttctagttttcttgaaaattaaatattttttcatagcataaaataaccgaaaaatcacaaataattttatattaaaatgtaataaagtgttcaaatttttttatttcaaaattattattttaattaacataaacatttttacaattatttggtaatgttcatttactttta

SEQ ID NO: 6395 - DNA, 850 bp, Glycine max
tcgacctccagaacagcaaaggaaagtcattgagacaattaataagagagggaagggatataaggagactatattttgtgatatagactataagcacaagtcagaacctaaaactctcttaaaatagtgcttccaatcaagacaatggaaacgaattttccaaatgataaaatgtgtgctttcatgaagtggggttttgagtagagactataagttaaattaccaataataaatatgaaaagaagacatatactggcattggcattggcaaaagaaaagcaaaaacacacacctgttaacctgtgcaaagaaccaatcttttctgtagtcactaatgccaacagtgtaaactaggtcttcatttggatacaattcagcatacctctcccacaagccatattgcctaaacctgccagttataggaacataaatttttccttttctctaaaatgaaggttcaagtaataatattgttcaactttacagcatgaaatcaattatgacaaattgtagtcaaattggaaaaaaagggaagcaagtaccttcctggatggttgacatactttttcttttttaggctaacactagtgaaattttctagtgagattttaacttttacaggtctctgagagcagaggctaaataaatgtcttattctttgtcaacataattctttatcacaagcaaagaaaattctataatgggctaaataaattatattttaccaggttgatgataagcatttatgttgacaagggaagcataaattcctactgctcgttcatagagcccaataagagcaccaactgttctttggtgtcactttcttgtacagtaactgtgatggact

SEQ ID NO: 6396 - DNA, 860 bp, Glycine max
tcctctagagtcgaccctgcagtgcatctcatgcttcctaaaagggtctccaaagttaagagtgctgacgtgatagaaaaaatcccctgattcatttgagccatacatggcaattggatgagtacgatttgtagtatcatatacatgaacaattacagtttgcttgctagcaagttgctgaagtaatttctccactaatgactcaacatcaaagactcccccaagatacctgcccagcaagcagtagtgaagacataaaaatgctgctctctttaactgtgttcatgattttttttcattttcccattggctttattgaatttaaaagtagatttataacttcaaagcttctaattatcacaaggggagagccaataattattcactcttctcacattaatagatttcatgaatcttctctgaaaatttgaatacagtgattagttacttagtagcacttcaaagctttagatgaccaaaatggaataagctaaattatatgaatgataaaaaatcataaaaattgaccaaaaaagctaatgaatgtcagatgcaaaaaaattcaaaaactaggcacacccgtcagttgcttgaatcctttcatttggggttgtatttgatgggagatctctcttgtaaacagcaaaggtcaggataacccctagtcgatttgttttgagcagcctaaagggcgcagttaaaacccctttgcctgattctcttgcacgcagcacattttcacggtcttcctgttgatgaacaagtgaataactgtgacaatcataaatccaaataaattgccatagattttagatatcaaacatgaacaacgtgtctcaattcagcttttgtgatattca

SEQ ID NO: 6397 - DNA, 836 bp, Glycine max
atgattaattatgtgcaacagatgttgtaggaatatagttttactcctttagtacttttgcagcatcttttttagaagtatgccatcaattgcaatcctacaatcaacatctttttctagacaattataacaagtttttctttaatggaaagggtactgttggtagaaagatctgtctggttttcctaatctctcatttatgtattatatcttttgctatcattttttcaaattatcactgttatcaagtgatgggtttccattctcctgttgaatactttttgtgatctacaacttaatttgtttcaatatatttgcagtggcttcaaggatttgtttgattggaagcattttattaatatgctgaagaatgatgtccacatagttgagaaattacctcctgcctatgctggaattgagcctttcccaaaaactccaatatcttggtcaaaggtcaacataacctgtcttctcaaattacttctttttcaaatctggaaagatatgtctgattaattgatgttctgcattcttataaaagtcagtcatccatccacctggtcttttaggtagccagttgagtttttaagaatatgaaagtatcactatcaaatgatagccttatatgtaccatcatactcattgtgtcataatgcttttattttatgcacaccatatcattttgtgcctttttcataatgtttctaataaccataattgaatatatacataatgcttatttacaggttccttattataagactgaggttcttcccctcctaagcagcacaaagtgatgtatttcactcataccgattccaggcttgataccatga

SEQ ID NO: 6398 - DNA, 877 bp, Glycine max
actcatttctttcatcttcttgtatcggtaaacaattccaaatatgttcaataattgtcgcttatattcatggattctcttcacctaaacaaaaatgataaagccaacagtgaatagtttagcaaaactatatagggaatactgatggattgggtagaaattgaattcacaagtagcataactgtcaggagaaaggatagtatcttcaaagtacaagatttgatgtttaaaagtaatttataattggggagggaaatgggaatatgacaggcggcctatcaatgacctacagcctagccttttttcagcctatgttgacctagactatacatcaaacaaggcaagcttaggcatttgaaaaggacattttaatgttcattacttatgatactttgcacattatataggcaaaacacaatcactactttcctaaaataaggctagattcatggtacctaatagtctgtgccttgattgtaaactaaattacaataatcacaatatgaccaatgtgagaccgttacgacatttttcaatttccactccatctttaaaacttacagcgcaatcaaaattggtggtaaaagaaaaagaagaaagaaaccaatctaaaggaaacatcttacctggatgtcaaacattgcatcaggactgacagaataccctgctttttctctgatgaatgctgcaactttaactttgttactcctctttgcttccctccactgcacttgtagatcctcattgtctacaaactagtaataaatgacacccggcgtgctcagttttaattacaggggcttgggcagataggttcaacgaaaaattcaagaatagggatagacgataaattaatatagtactaccttcgtagctc

SEQ ID NO: 6399 - DNA, 864 bp, Glycine max
gttgatattgagaaagatgcagtagtcttgacatctggagaaaggttaggtgcttcagaaattggtttgcttgctacagttggtgttacaatggttaaggtattctttcagagtgttacgatgacaaattgattccttgggtggggggactttgatatgttctgtcttgtgtatgtttatatgttctactgttgagtattggtatatgtaatgatgggaaataatgctttgatgcaggtgtatcctactccaacagttgctgttctttctactggagacgagcttgtggagccaactactgggcatctgaatcgtggtcaggtattgttatagacttctaggactagtgagacaagcttatgtaataatgtaatcagttattagaactattgcgtggaagctggtgactataacttataattgactaaaattccatgtcaacttcaagtcttttcttaaaggattgctaatgtcataatattttgaatagattactaaatcgttatctaaatctacctagaggtaataccaacattaattttgttgtttttgattttagcattagtagtatgttgaagaatgaggattcaactaggcatttgcacttcataatggacctgtaatgcgcaatcagctcatttgtgggaggcttaaagctgttatggcacttgaattctaataaatgtggttttggatgtaaatttcttaccctgtgcaaatgtattgtttaaaatttgttggacaacgtagcacttgttttaccacatcattcaactacccatttatggactatctgtttgggtttgtgccatggtatacaagagttactttggtaaatatgactaaaatgaatgtagctaatat

SEQ ID NO: 6400 - DNA, 866 bp, Glycine max
agaatatataaaataaaatgaacaaaaaattaattcctagccaacttgccaattggtatctactgagacaatataataagcaaagacaaaagatgctcaacaaatatcatatagattgcagctaaaaaacaattctagagtatctccactatgttcaacatggtaatttcaaagctaacaattcttattcattaacctctcaaatgaaaatattataatagccaccttcctcatggaaatctcttcatttggagaaactgcccaaatgatatatgagaaaaaatgttatatgaaatagttttgtattgtaaactcaattgtaaactattatatatgattaatttattgacttttataataatcaccttaaaagtcataccaatactaatttgtgattgaataactttataattatcactcttagactcatgatatattatatgtggacatcccattcataacattataagaataaagaattgcaatttgcacatatacgatcaattgccagagaaagcaaggcaatgacatatggtgataaatgctgcgtcagacagaaaagcataaatgtaaataccaacatatactacaagaaaatatgcattttaaagcaatttaaggaaattatttggcttcaaattaataatcatctaacctttcttattacagtgacttctgcatgagcagtggggtctgtgttcctcagaaccatgttgtgacatctagcaacaatttcatcattacaaactataatagcaccaaaggggacccccatcttcacagtctacccctttatacgcttcttcacagcaattcttaaaaatttgtgtccctttgctgtatagctaattagccaatgcacacca

SEQ ID NO: 6401 - DNA, 872 bp, Glycine max
ttgcatgtcctgcagcagttaaggaggtcacactgtgaatgcacaattgtttgtgaatgtgaatttgactgagtgtgcacctgtgatatgtaacgtgtatgtgtattgttccaacagtgtatacaacaatttgttggtgatgaataaaacaagattttgctatctacttgtatatataattggcatataatagcaaatgataaagaaagagaggggaaagagaatctgcgtgcatgcctgaggcatagatgcttaagagagtgagggccagtagagcttgagcttccatgattgttttccccttctgcatgtggttgtgattctccccactttgtgatgagaccaatggtggatgtggtgttatataggtgcaagaaggatttatatttggcaaattgtaatggcaggcatagttaggatttagttgacttttcattggtaatttagattttgttcctatgtaaggaaggaaatttactttttttgatatagatgaaaagtattctcaatgggagataatcctatttaagtcttttgaaattagtatataaagttaaattctttcggttaaactagagtaatcttgtgccaattaatctatatgttcatgtaataataattattaattaaaaaattaataattgagattctaattagttttgattttattatataatttaattattcaattttttcataattttaactgttattttattctaattaatgattatgaatgtattttattttctacaatacatattctcacattagaggatcactaaattcttatcacttgtttgaatttgtttttatatatatagatgtatttaaagattattatttattattttcaccatttttaatattat

SEQ ID NO: 6402 - DNA, 846 bp, Glycine max
  misc_feature (829)..(830): n is a, c, g, or t
atgaaggttttaataataaacagttttcatgttaagtgtacactaacagatatattggtatatactggcaccaaattttcagaaacaatcctagttaacatactaattttaacacacttaataattgggtgaatttgtcccactagagagtgagtctgtgagtgagacttgcatgacttagtcacacgtgaatttcacccaatagtaatgatgccagcattcttcaattttcaatgcatttgatttggtacattgcttacgttacatctaggtcgtcgagcagcaataactggtgaagtttctgttaaaccatatccattctgtactttcacaccaattgcctgcatgttatgaaaaagcaccaatgtgaagtaatcaagtagattccaacaaaaaatgtttataagttacacatgtttgagatatcagacctcaaaaaatttatccacttcccaaggcaaactaccaccaccacttattccagcctgtagagaaccaagaagtttctctcgtcaaacaacaatttccaaaatcaggaataatgacacaatatggtgtagttcagatgaatagttgaatatatatctcaaaactcaggcaaaagaaagaatataacgataacaactactccattaggatgtcttaaggtaagaatattaccaacttaggaattagttaatacaacaataactgattaaaccttaatcattctttaaacatcatgatccagttaaatggtcaattgtttcaaactgaaaatattttacacagattcctttttcataattttctaaaacctttttaagagagacagtattgcacttaacannactgaaaccaataaat

SEQ ID NO: 6403 - DNA, 926 bp, Glycine max
  misc_feature (890)..(890): n is a, c, g, or t
  misc_feature (911)..(911): n is a, c, g, or t
agcttcgcatgttctgagcaagtccctacctctatggtgggagtcgttctcctgggtcacctggcaacaacattgctgcaaaaccctagtgaccactacctgcagcattcagcagggacagcggaaggaaaactgcttacaagatgaaaatgctggtggattgctctaacatggacaatctggaatcacagaaataaaatagttttccaaaatcattcgtttgatggaagtaaaatattggatgaagcaattctcgtactctggatgtgggtcaaatccatggagaaggactttgccatacacttcaaccaatggtcttctaacataaaggaaacattcagtaactaggaggggaagggtgatgctgtaattatgaattttcatacatattagcttgggtctatgtatacacgtgaaccagctatatatctactcctatatatgtatccctagtacctctggtactatttattattaatgatatatttatttttgctgagcaaaaaaaataggctagacaataccattctatccctaaacatggattacctagatgttcttcccaagttcttaacatataaacatttttcaatatctatatcctaaagcagtacatggaaagagatgatcagatcacaagcatgtgaatgaacacaaagatgaacaataatatcaatatcatattaatagatagtttaaaatcattacatcaaagagagttcagtttgcagagctcccaacacagggggttttagtctctcattgtcatgagagacttacaaatataaaagtgggatgcaagggaagaaaatggaagagaaatggatttaaacagatcagccagagctcaagaattgatttcctttcaacatggctctttgcttccttgntcctctgctttctaatggttnctttgttctcaagga

SEQ ID NO: 6404 - DNA, 832 bp, Glycine max
cgacttgcatgcctgctgtaataccctacccctaggtgggagtctctgtcttgggttatagcaacagcactgccacaaaaccctagggaccactacctgcagcatgcaaccaggacagctgagggaaagaagcttacaagatggaaatgttggtggattgctcttacatggacaatttggaatcatagaaataaaatagtattccaaaatcacacgtttgatggaagaaaactgttggatgatgcaattctcttactttggacgtgggtcaaatccatggagaaggactttgacatacactttaaccaatggtcctctaacataaaggaagcattcagtaactaggaggggatggggtgattctgtaattctgtatttatatgtgcattagcttggttctgtgtacacactcgaatagcttggttctgtgtacacactcgaactagctacatacttgcctctgtatatgtaactctagtaccactggtactattccctattaataatatatctatttttgctgagcaaaaaaaagaaagaatcaaattcgacttctatgcaggtctatgctaactgcccatatatacacgagattcgcaccttcctccaagttcttgggcttttcaaatcactttcagtatcttatcacaccctctttctctctgaccccaaagttgtcatctttcatttccgctaacatgtccactttttccactaagaacgacaccgtcatccacaaaacgcagcaacctttgcaggttcaacctcttctcccttttcagatcatcacactctccggattcttttattattagggctcaagatttttatg

SEQ ID NO: 6405 - DNA, 831 bp, Glycine max
atttggtgctctggaaatgtaatttagttggaatgaacttgtgttttagttggttctttgaattatatgtattttttaatttttctagctgcttaagtttgtgttttttttcattaatgtgccacaggtcattttttttgtctcacatatatatcctttttcttcataataaatatatctattgagatgattgcctttgtcttcattcatttactttttaagtttaactggacataataagcattcaaaatacattatataaacttgtaaatgttttattaggtgttatttgtttcagtgatttgattttgaatgttataccggctggattcgaacccagcccttatggaattgtcttacgacaattaccaaccatacggaccaagaatgccggtaggtgttatttgtttcaagatatatgattaaaatcccaggatcactataggaatgttatgattgaacatcaattgatatattggaaaagagtaatatcaaatcacacagaatacagcagaattttctgtgtcagagtcatagactcctacagagaagagttctctgttcaaattactagaaaacaatatgcatatatcccctattacgcacacatttaataatatgtaactgctcctaactttctgccccaaactgtcaacatgacagttaccattcaacttattcaaataatataaaatataggcttaaatatgtttttgatccctaataaatatttgctttttacatttgctccctaatgaatttctgttttgccgttgagtccctaataaacaacattttattttttggtccttgacactttttttagtcctg

SEQ ID NO: 6406 - DNA, 824 bp, Glycine max
aacccagatctggtagtttacaaattgcttccttttatagaaactgaaccataatgtttcatttttgagttcctagtgcccagcattcttttttatcttctcttaaagtgatgtttggactgtgaaataataacagtgtgttttttctctggttatttcagtagacaatatgggaagcactggtttgctacatttgatatgccttgtcattgctttagtaagtgtgtcgcttgtgcaagcagaagatgcgtataagtatttcacatggacggtgacttatgggactctttatcccttggctagtccccagcaggtgtgcaagtgtaaccaatctgtttttgttggatctaagatatcttttgaactctgattctgacctttttggtgcttttttttttttttttttgaaggttattcttatcaatggtcagtttcctgggcctagacttgacttggtaactaatgaaaatgtaattctcaaccttatcaacaagctggacgaaccatttttactcacttggtatggttctacttctttgggtctcttgcttgactcaaattctgtgctttatggtctgcattaattcctttctgtgcatacagcaacttgtgttttcttgctttggatttttacttgtccccttgaaactgaagggaatctgttgtctctagctgcttaattgggatagatcttgttattatttccacattttggatgaacggagttggacaaaaaaggtgtcatttttgttatgtggagcacttactgtttttaacttccacagatattgctacattgattctcttttcgtagcaattgcggc

SEQ ID NO: 6407 - DNA, 907 bp, Glycine max
ttcatgccaaccgaagctaccaccaactttgaattgcacggaagcttcaacacaagtattggtggcagccatgaaaatgatcacacaagtagaaaggacgaacaaacgggatgccatggatattgtctaattctttattatagcaaaatgtatgtatagaaatagaagcaataaatgatggtaatccaatgccaacagtagagaggagtatatatagagcacatgaatatttgagggagaaaaggtttagtgggcagtttttgtgataacgtgggggcagtacgtagtggcggttacacgttgttgttgtagctcaattcatccagctgcaacttactcacatttttaaattaatttcgcatttgtattttaccggcttattttcgggtgataaaacatggttttagcataataatcagattcaatggtttaaccgttgaaccatttttatatttttaatattatataatattttaagtaataaaatatttatacttgtaaaaaaatcaagatctaaagaattgtaaattaacacaaatgactaaattatatgtgttattaataaaaattaataatagaagataaaataattgatacaaatttaaaatacctaaattaagtatttttacttatcttaaaaaaatagattaaataaaaacaaaaaataaaataaaacttaaaaaaattaagaagaccaattgaattccgattctgtgtcaattcaactctgattttcactactctaattttcactaattgattatttatcggttctcaccagttctaaaatattccaattttttaagagtgtccgaatcgatcaccaagctaaatttccacggttgggttgaaccaatagtcgatccattttaaaacatgattacacatatttcgtaaaaaaaaacct

SEQ ID NO: 6408 - DNA, 875 bp, Glycine max
aatttgcagatatagtggttaagtccaaagaggccattgatattcctagtgaggagctgcaaagttctgaacaagcagaagtagaagaaagaaaagatgatgaagtggaagcagttgctaaaaagaatggaacagatgaaagttccattgaggatgagaaagaagagttgcctgagccagtaccagaaccaccaaaattggttcgtatggcaaatctgtgtgtcgtaggtggtcatgcagtgaatggggttgcagagatacatagtgaaattgtaaaagatgaagttttcaatgcgttttataaggtaaacatttccttggtcaatgtgatgtagtgcttcaattgagtaatgtttctaaatacatatctgcaatgattagctttttcccatttaaaatcaccaaataactcttagcagtcaacacttgtctatgaccaacggtaggaaacaactctttcttgccaaaagggcgtaatagccatataaaatatggatatttccacaattttcctgtttcaaactgattgctccatgctcttagaatgtgggttatgagcctaaatcagtcctacaaaaaccagcttgtaaagatgaggggttgtcccccacttacatatttcaatttggccatatcactagtgatgtgggatcatggatacttctaatatgcactatggtaactgatatacactaacacatgcatgcttccattaaaagataaaagaaacttctcacacattttatgacatgtatttagtatatgcacctttaatagcatttcatccttttctgttttctttagattatgacaaggttctaggaaaattgtttatatcattgacctctatgctatgtttcttgtagttggggcct

SEQ ID NO: 6409 - DNA, 880 bp, Glycine max
agcttgcatgcctgcagaagagtaaagaaaactcggtgatgtccttccttcatgatttgttgctgatgggatccgtaatggacttgataatgaatgttattaacgtttataataaattgatataaaatatttcttttttttttaaacaagatttgtgtggctggggaactttttcccgtccagaagctctgttgtgcgtaacatttttatatgtagacatacattgccttctgatgcagtggatttagtttggtaatgtagtgttcttttcatattgttaattgcacggcccttcaaccatttcatccccctggcaattcgtgtttggatactttttttttcattagttgaaattcatgtgggttttattaatctaggaatgaaatttaccaaataaagaatgagactcattttgtgggatttaattgaatttcatttgatgaaagagtgttggcatttctttgtaagaatttttcttaaatattttacacatgtttgtgacattagataaatttcagtaagttataaattcttccaaatggttgttttttttaaactttgaataggatcactctgtatttgtaatagtggtttgtacaaatatgaattttaactaattaaaaatttaaatttaaaaagttatgaactgttttttaaaataaatcatatattaagttattaatttaattcacttgtacatattttttaacacatcatgcaagctattaacctcatttaattttctaatacgtaaaaaattaataaataacaaggctttaataaccttatagtcttaataaaataaaatttattttggtcatttgaagattttgtattgattttagtcattttacttgatagcaatactaaaactaaatta

SEQ ID NO: 6410 - DNA, 835 bp, Glycine max
cctgagaaactacactgcctgttgctggaaactccaacaaagcattagctgacttcatactaagtagtcgactgcttacctgatgaccagtgctcacagcaacaaaactgagattcaaggacaggataaaaaaatcattcattagagagaccaggtgaaaatttagcaacaatgctccaaccctccacataatgccctccccctaaaataaaaacacacgcaatagaacagatctgcatgtgaattcagctaacccaaccagaacaaaacaattcatcatcaacttaccctggattgcctgatccatcattgtcagtccatataacagaagcacgatgatattctggcctaattggatctgtctttattggttgacgaagccgagcttgtaccctgcatagaaaagaaattaaatgaatcaaaccaaaagaagcaaatcatcttaaaataattgtactttggaaatttacaaacctaaaatgatgaggatttgtccaccctgcaaggtagcgtattgcagggaccacaaagagatggaagcaaactaaagagctgacaggatttccaggtagcccaaaagctagaattttgctctctgtagattgaaagtcaatctctgcaaatgtaaatggcttgcctggtttaatacacacctgaaagatataaaataaaaataaataaaataatcctaaattatgataacatgatttaaaaaatcatactcaccaaaacattatacagaagggaaaaatatctataatatactacttctacaactacaacacattgcatccatggcccagattacaggacatcataatttaattgataaaca

SEQ ID NO: 6411 - DNA, 874 bp, Glycine max
atatgttctgagattatgggacccaaaaagcctttgatgagacagatagagaagggggaaaaaatgatgaaaaataagtgaaagaagaaaatacggaatcataccaaaaccacacacacaagttgtgttgtgagagaaatatatggaggctaacaaagtgagtggttgatcagaagtcgtgtcacttttaaagatgctctttattatgagttgcaattgtgagtgtattgggccctacggagtagtgacccggccctcattgtatttgagccttctttgtttgctagcttctgctgcaagaaccctaagcaacctttccaatcagagtggtatcgaagtgtattataacatttctttggttcgagtgaaattaacttaaatattcaagtcttgtagcaatgaaaaaacgttattaaaatgagagatcacccaaaagatgatcggtcaatcacattttctaacaaagattaattctcaacaaaattactgaatacttcattccaataacattttaaaaaatgtgtaaaattagccttcttttactgagtcctatgctttgaacttgcaactttcaatcaagatacatgaaggaaaccaaatcttgtcttaggatggatacacagctggactagtccagttacttccatagcttacgctgaaaatggtaaaatgggtccaccgagtgtcttcaacttaaagggcaattcgtttgctaatggggttacatcatgggtttgtccaattgatgattgagcaaatcttgggcttttctttttactttgtgatccaagggggggggtttatttttctttcagtaacctttttcatcctggctatcatgacatggactaaaactttggtggaataattgtta

SEQ ID NO: 6412 - DNA, 882 bp, Glycine max
  misc_feature (871)..(871): n is a, c, g, or t
atttggaattttggatatttcatcttccttaatgggattggcgtctatctaattttcatgaaaacacacggtatgttgattgttgcagattcgttttgtctacgagttagttggcgctttgccacacgcggttttgtttcttatggatttgcctcaacccttcaatgctttccttttcgtataagcatttgtctttgcaccaaattagtacgctttatcaatgtaatcttttttcgtttataaaatggatatccaattaatggcttttaccttcttttctttttccctttagcttgaaatggtctcatggttcaatacttaccaagaaaaatatacaacttgctcttctaaaagtgtttgttccaagaaatttgtttgtttttctacttttttgctaccgaccaagttttgtcacttataataattaatttaattatgattaaaaataatgatttacatcataattaattcaattactattaaaaatggccacaaaacaagtgtcaccttagattttgaatgtattattaactatttttttcactaatactcataatattactctctttcttgtatttagtatagttagttttctaaaattattatttttttatctatttattaagttttcttggtttttttaaaacaacctagaaaagagaatggtattagttttatgttgaaaaattaaagtaatatttattagggatataggtgggaaaaaaaaatattacattgaaaaaaaatttatattacattgaaaactaaagtaatataatatttattttggaataaattttttttcaaatatgacacttattttgggacgaagagaatatttattaaaaaatttaatatgatttaattttgngataaatgcta

SEQ ID NO: 6413 - DNA, 827 bp, Glycine max
agaactcagtcccacattccaccatacaatagagttgttctaatgcatgtctttcataaccacattgcagcaatccatctacgatcgtattccaacttacgacatctttgtaaggcaatctcctgaacatgtcaagagacttctccacatctcctgcacgcagatacgcaccgatcatgatattccacgacacaacatccccctcattcatcaactcaaacaacctttctgcgtactcaaaaaccttgcatttcaagtaaagatcaagaatagagttccccagcacaacatctacatcaatcccatttctgagcatccacgcgtggactcccttgcccaattgaagattgttgtcaagtgaacaacactttaagacactggacaaggtatattgatttggacaagcaccctttgcctgcatttctctgaaaaggttaaagaccatttctgaagagcccgctcgggcaaaacccgatataaggatggtccatgtctgagtgtttctctggggaatttcatcaaacagcttctgggcatgggccatgttgttggatttggcatacagagtcaaaagatggttagccgggttcaaagtttgaagagagccattcttgacgtagagggcatgaagggtacccagtggtggtgggctattggataaggtgaagtgatataaggagcatgattggagccaacgaaggtgaaatggggttggtagtagaactgcgataattggtcgcggaaactaggaagacatggtttggcgtatatccgagaacatgatgaccccagacccatatagtgttggccccccaacgtaggccctt

SEQ ID NO: 6414 - DNA, 833 bp, Glycine max
aatgaatgaaatttctgatatgataaaaaaattattgaaattcttgtttttatcttatagggtgtataattttgtgttttaaggtacgaaattttaacatatggtattgcctcagttaatgtgtgaatgattcgacttcgctggcttaatgctttatagatggaattgttctcctaactttatttatcaccacgaggagcaattgcaatgaggggcaagaatttatagtctttgcaatagagagaaatcatattatgttattctttattcaacttacaatccaatatttgcagatggattctcgttgcattgatgacaacaaagaagacaatgaaatgaagtctgctgaaggatttgaagatatatttggagatccagaagttctgcctcgtgttggagaggaataccaggcagaaattccttcactaattacaacaccttatctttctcagcttgtgaagaagacaagagattcagaaatcactgtcatcgagcaagagtctatgtcactaggattgcccattcctcttaagtgggcacattgcaaatttgaaggtagttgtggttgtgggctttcagaatctttcacaagtgaagcggggccaattatttccgagaatgaatgtccagaagttgaagtgacacttcagactgtttcacatggtggagagaaaaatgtaggagggttctcaaattttgaatcatcttctaaaagtgttcagcccaagaggggaagtatcttctccctggattgttggatgatcaatcttggacagatattgaatacaacaatttttcttcttggcctctatgtattttgggaagaaccttaa

SEQ ID NO: 6415 - DNA, 852 bp, Glycine max
tgaattgcttatgcttttgaatgtatcatctgatgaaaaagtattacctacaacatatggagaattgagacctccactcgggaagcatcgtttaaaggttagttgttatggccatcctccccaccaattctaggggagttgctatggtacccatacctagggtgaattgttaaacattttgttggctgttgatattatcataaatgtttgcaaatttgttatatataatcagcaagtaatgaatgattgacaatgtaacttgaaaaaaaaagttggatactttaaggtgtttgacaatgaatgtttgcattttcattttctgtttttatttcttgttttcattttctgaaaactgttttcattttcaaaagatttagaattttgaaaacatgtttggtttgacttctggttttctgcttttaagaaataaaaacattgaaaatgcattttcaaaaggaaatgtatttttagatttgcttaaaattacattccttgccaccgcgttttcatttgacccaaaatgaggttgaaaacgagattttattgttttcaatttttggttcgtttgagaaaatattttcactgaaaatgttttcataaatccaaccaaacgcatttccatcaccattttctatttctagtgaaaatgaaaacagaaaacagccaaaccaaacacccccttagttatgtcctaaactaggttgcagtctggctagtagaggttgaattcttgttccaaaaatatctttgctgtctattttgaaactattttatgcaaatgttctattctttatgcaggtattgctaatgcgaactttgatatctttttattttctggactgtctgcaatta

SEQ ID NO: 6416 - DNA, 823 bp, Glycine max
ttctcgccagcttgcatgcctgcagacgaacccaaacttcacgggctgtggagttcaattctgtcgaagatcttgtagaggcttcctcttaggaaatgcactccttgatatgatcgtgccagcttgctccttctttgcaattttaatgttttctttcatgtcactagccccaagtacatcccttgcacgtttcacgggcacactctttacaatcaacttcatggatgattcaacattaggataaaaaatggcgttgtcctctgaacttagaattggtgtacactttgtgggtgtttccaacttctcttggaaagtaccttcatctccagaaacagtgtctagaaatcaagattaaaaaaaatatcaattgagtcctatatataaacagtcactttgtattggtaaactcttaaatagacgttgcaatcctttaaccagaattcatttacctggtgcagaaatttgttgaaggttaaaagtgcatgagttcatttcaacagattggggcacagttggagcatactcatctggtttctcatctgaattttgtccatcagcatcatcaatagactggaaatcattcagcaaatatttctcaatgctatccatgtcggtctttatatggtgttgacttttgtcttctgcttcagttccaccatcatcatcatgatcatcagagttgtcaaacaaccttgtaacttctccttcatattggatcactctcctccatagatctctgcaattcatttgccatattcaaaacttcctgactgtattctttctccatctggccactttctatgctttcttctatgttgcaaga

SEQ ID NO: 6417 - DNA, 864 bp, Glycine max
actaatggttctcattcaacagacatggttgtccttattttccccatgccagttatcctctgactaataaaactatataaataaataaataaataaacatttattttatagcattgtacatagcaagtttcaactacggccatgggcaaccagcagtcgtgtaaactcagctcctaagcccaagcccaaattcagtacctcattcccgacccacatacccaaccaggtccaccttattagatacatataaaaataaatttgaaaaacagttaaagattaatgataaaaaaagttatttaaaaattaatttatcacccaatttattaatcaaattaaataattttattcacttaattttttagattctatcattcagttatgcaattaattatttatcatgttttaaaaaattaactttcataactattttctaataatatccattagaaaaatgtggaaaaaaaaagtttcgagtcagaattttcagcataaatcgaactcatttaataaatttagtatagcagtttctcccaaataccaattctctattggaataaaaaatattacaatttaaaaatatgtaaacagttttttaatctattgttttacaaatttagtttcattttctagcataaaaaaatcaaatgtcgcatggtatttctttatctttttattattttatatacacacctctcaaaattaaggcaaacaataaatgtccagtccatgttgaggtagaaaaaagagaaaaaataaataaaaaagagagaaagtgatagatattgtgaatagtggcctgttccaaagtctttagcataggagaggtagttcgtcgttttaagtttagcttgagtgtgctcatta

SEQ ID NO: 6418 - DNA, 885 bp, Glycine max
gctgggtgatgcttcattattaatattgttaatattaatgtcaagcattgggcttaggttgccctccatagctggataagtgtatggtgtttcgactttattcccagtaagtgatggaaaatctaatttactaatattatcatctttcagacgaactttatctatctgtgcttcagcccacatttgtttcttcagagcatttgctgattccagtcgatcctacaatactcgctatgtcaacttaaaatctaaataaaaataaacttaagaaacacattagacaggaaagaattgcacctcaagaacaacacggatcgaatttccttcatttgccacaccaaccaatgcaacaagagcgtttagacgctcctctacactaagatcagaatattctccttcggtaagccctagaatccaggactctccagatttgctttcatcaatttccatattatcttgatcaagattgctagcatttaaatcttcacaagcaacaggctgtctggtgacagaaattggacaatcagcatccttcgaaccattcttaggaaaacaaggtagatctgtatcaaactctttttgaataagatctacattgtgacccaaattttcttttccatttgatgagcaaatgtttgtgtcctcatactgttcagaattttggtttgcacttgaaggatttactaaatcatcatcttcaggatcctcatcaacttcatcactttctgactcctcttctctttcacatcatcagcatcttcaccagctagaaacccattttcaaatatctgaattttctttcttgcttctgaagaatggagtcagcatcagcaggattctttctgatgcatctcgtacacatatgttgatggagccatctttcaa

SEQ ID NO: 6419 - DNA, 826 bp, Glycine max
gtttccgcgggatttctctagggttttctgatcgttcctctccttctcccacgacgtcgtttttcaattgcggtcactctgtgtagcgtccacgagccgccatggctcccgggcgtcgacgcggagcgaacaaggcgaaggccaatggccacttgagtttgggcgatcttgtgctcgctaaggtcaagggcttccccgcttggcctgctaaggtctcactctcttccttctacttttcttcttctttctctccaatattattatgattttgcgttttgtttttttttgcaatgcatatctcatatcactgctgattttttaatggttcagcatggctttcatgtccttttttcccgttagtttgtgaaattgctcagatgagggattttacattgtttaatgtgatatgttggtcatccacctagtaatatggccagtatagtgaatataagtaggggcaaccctcgtcaataccctagcttttagggttaagttatgccggaagtcaaattctaagatggtactagagtccggttgggtctatagaaatacctgttattatacctcctatagatgtccagccttgcaaatttcatgctcgagggatatgactaaagtgagggacaaccctcatcataggttagcttttgagattgagttaggctcaaactcaatttctaggatatgatttactttgcttttagtttacaggttatttaccctagtgttgttagtattcttggaaaattggatctggtggtgcttttgaatgatggctatttctgcattgtaataagggtttcacttatggggccttggtgaactt

SEQ ID NO: 6420 - DNA, 841 bp, Glycine max
ttgcatgcctgcaggcattgcaagtgatggttcatctgagaatgacgaaaatgaagaaaatgtaaatataatagatgtaaaggaaggtgatctgaatgatgggttgaggaatatgtcagagaagctatctgctgcactagtgaatgtcaatgccaaagaagacttggttaagcagcatgccaaagttgctgaagaagccattgcaggtacattcctctaaagctccctgtaattttgcagaaaaaacttctgattattataccttatttcttgattatcttttcttcaatatgctttgatgttgtgagacatgtgcctacaaaacaatatatcatctgactattgaacaagaaaaccacccagcaagttcctcatcataaaggagggttaggagttaggacttgggtagggtttatggaaattaaaagtctaagtgcatctgaattatctcaatggtacattattagatcaagaggcttatatatgatctatcagaacacttacatgctgacacttgcataagttgtctccttgtatgattccttggtatatttattttctgtctttttctctttttccgtttttagattctctattaattggatcattgtcattaacttaggctgggaaaaggctgaaaatgaagtggctgttttaaagaagcaacttgacactgtcattctcaggaattcagttctggaagatcgagtcactcatctagatggagcacttaaggagtgtgttaggcagctaaggcagacaagaagaagagcaggaagaaaaatctatgatgctggtgcaaaaaagaacaggaattggaatcagccaaaattaacttgag

SEQ ID NO: 6421 - DNA, 881 bp, Glycine max
ttgtgaacccggttttcctctagagtcgacctgcagatgatgttatgcatgattttttttcttcttaccaaccatataccacggtatattactggtatgaagtattaagagtaagaagttgtgattaatttttcaccggaatcgtaagcacaggtgaataatctttaattataggattcaaatattaaacattatcatttaattataggattataaatttataattataggattatgattgaatcaagatgaaaaactgtttatattatgatacataatttttttttatctagctttatcaatagtcttaaattgatcatatttatgtatcatatttttagtgaaaataattaatgagatatataaaattaatgataattatagaaaaattaaatattaaataaaatgaatatttataatcattaaattttattattatataattaaaaatttatataaaataggattgtttcggtttggattattaaaaaaaaactcaaaccaaactaatataatgaaatttgattagttcggatttgattatttttatgcaaacctaaaaccatgaaaaagaaacagaaagcaaatctttggaaaaaaaattcaagactttgcttttattctggcttctccttctcttatacaaatatttgataacaaaaaatatatttaactatttaagactgtttttttaattttgggtttctccttctttttctatctcaaattttaagatttctagaatgcactatttaaaaataactatatggcaaaaaagaaaacttttaaatttaaagattatattacaaagtacctttaacttattttttttaatgtcaactaaaaaaaagtttttcaccaaaaaatcaagttaatactac

SEQ ID NO: 6422 - DNA, 798 bp, Glycine max
aagatgggtgggtgttgatcacacaaaagtgaaaagggtggacgggtattagcacagtgtgggtgacgaacagtagagagaagcatgggagactaaatctaattagggttttttaagattgatagcaatacactcttttaaacatttctttattatttgctaaaatttattggcaatcaaaaaattgtgaaggtcccactcttatttaatgagtctcgattctggattttgtagttatcaatagattttaatcaatagtagaatgtgttccaaagaaagtgttagagagtatgttgccagcaattatttttttaattctataaagggagagggaaatctcaactttgaccttaaaatgccccccaaaagaaagttgtttcaaagggaaaaatgagtttgcaaaatgcctcactagtgtcgcagaaggccactactgcatccacaaggaccacaacggcctttattgaaaatgagccgctatggaaactttacagcagccaatggccattacacactgctatgaagctatagcacactatttttttatcagcaaatgctagttgttagtttttgttagtagagcattcaaacccacgacctctctcccttctcttctcccttcaccaccaagccaacaagctatagcctactatctattgataactatgtctacaacaagtaaaagaattggaaactaaataattagtgccattacatccaatcatgtgggcatcttgctcatttacattctcatcaatgcaatttttcagtataatccattttcagggagaatggaac

SEQ ID NO: 6423 - DNA, 1004 bp, Glycine max
cagacaagctgccttgcgatccaaatttggagcttgatccgtttgccatcaagctctatggttcttatcttaaaatcaatgctacatcaggaaggtaggccttgtgaagttagagagagaaactgatgcaaacaaaattctgcagaactctttattatcttttcctctagcagtgtgttgcttgtctgagatatatgttataattttgtttttggatgtgcagttcatgaatgcatttgacagagcaatgaacttgcttgatgataaattctcattccttgcatcaacaaaacagattgtgagcagtgcagatgatgatgacaaggtgaatatgcccccaaatgattgtactatactcattcataatttgatgttttttgccacttgctattcaattaagagtttgtcttgtatcaagattgattaaaatagaactgctttcaagtttcaagaaaatatacaataggtgttgtgaccataatgtgaagaggatatttctcaaacacgagtgattggagaagataaaaccgttaacaagccattgtctactcagagactttgagttaatgtcatgcgtaactgattgctattttagaattaactgcctaatagttttttcttttataggttatagtctttgagcgaggagatctgatatttgtattcaattttcatccagagaatacatatgaagggtatgcaatatatgttcatttttcatctgtgtttagggatattaattgcaacaaattgtgtattttgttggcaaattttaagaatattactgtagtaattactgttaaccacaaataatttggctgaaatgttgaatatgcaggtataaagtttggatgtgacttacctggaaagtatagagttgcattggatagtgatgcttgggaatttggaaggacgtggaaagagtaagccctaatctctctgcggtaacatgagtatatcagggaagaaactactgtcagcccaagggggatgccactctatcg

SEQ ID NO: 6424 - DNA, 851 bp, Glycine max
atgtcattgagaagggtcaagagcaaccaaatctcactgttggaattgttgtagccgttgtggttgtcatcgtgtcagttttcttgaggctcatatttggtgggaagaagaagcccgtaagtggtgaaacaattttattttcccctgaacttttagctcattcttattatgttgatctctgaaaccccgtgtgtgttgttgtgcagacaagggtggagaagacaaacgtagaaccagcagaaactgcaactagccaaggcagtggtgagaatgaggaaaacaaagagaaggaggaatcatctgcccctgcacgtcggaggccaacaaggagagataattgaagaaatgattgaaacttaacagacaggggcggccattaaagaacactaccgcacataaattttgagcttagtttgggcattaggccaattctgtagtagcaggttgttgtaatttttcccttcaccttttgaaagatgatattgcgtaaggagtgtagatcagatacacaattatttttctttatttttctggtaatgtaacacagaaatcaactcactgttacatttccatccctggtttgagtacacatgcgtgacgtgatccaactttaagaatacgtgggtaatatacgctgtttccgctgtgtgaatcttgacggcagaatccgtacttcactaataatttttcggaaatgctagttatgaatttactttataaaatcctttcaagttcgtataattttgggaaaataacattttaccggtttacttgtaaattaaaattaaatattccaattttggctaccccaatattatttttccatttgcgggcttaactattctttttgc

SEQ ID NO: 6425 - DNA, 841 bp, Glycine max
aattgcaacaacctgcactgcacctaaacgtgagaattttaggaccagaagtggttgatggtgtggccctccaaacaactttaatataattattatctgctcttataggaaaagtctttctttgatttttcactgtgatttactcctatcatttctacataataaagcatcgaaagggactcgcgtttcctctatcttactattattccctcccaagctgtccaatccttctcactttctaacttttccacccctctatgactaccacttcttaatctcattatgcatggaacagatatccttcctattaacgtttaaaattttctaatcaaatgcaagtgatttatcttcccttaaattcaacaaccccatgttctatttacaccttaattcagatacgttctacttcacggcattgactaacataaacaatgagagagagtgtgtgtgggtggctattagaatttaattattagtaggttcacatggggacacagttaatgcacacatcgatcatatggtaatcttgatcaatgggacatataactacactggaattcgcttttagaacggtaaataaacagaccagatgtactaaaatgaaaaaaagttaccacatttcccttcaaaacactgcacatcatatcatataattacaatgtcagtattgcttatgtaaaaatcatttactattagtttttccatttccagagattatcagggaatcttgactcttcaaaccatataaaaataaactagatatgtccggagcttcatagaaaaatgtacctgtagatttcctcctttgggactgtagggctatttttaattggcaaatgct

SEQ ID NO: 6426 - DNA, 826 bp, Glycine max
tatcctataatttgattgatgaacgtattgtatatatcatgtaatattcttatcccttgaactcacgtaaacaatatgtgcctcgggtttgatcatctgagtgatagaaggatacatctgagtttgtaagctgattgatcatcttattgatgaatgtatcctataagctaacacaatgacagaatgatacatctgagtttatattgaccattgaccgcagtcggagccatatttgaacattgtcataccagcatgatgtaaggtggtcggtccattttgatcgtcgaatccagtatagttccactgaaacttttgaacattgtcatatccatgtccgtcctgtgaccccattaccgttgaaatagttggcactaactagaatacatactttcatatccattttactggcactagttagaacaaatacgtgtaacttcatcaaatgaatggatttcaagtccattttaggcacatatgagtatgactgtatgaccaaatggaccgcttgcttgcactgccatagtttcaatagcaagaaagccaatcacgaggttgacaaattgaaaagtttgttatataatatgtagcattataagtgtagtttcaacaagagttaattacattaactttggtagtcatcactcaaaaggttatcaacgttttttatattaagctcaacaatttgttttggaagctgttggcattcggttctgaaaaggaggatcagtgacatcaaattaacaattttctgtatacttgctcacttgcatacaataatcctcttaattctttttttctctctttgaaattgctggcattaaaattt

SEQ ID NO: 6427 - DNA, 845 bp, Glycine max
  misc_feature (690)..(690): n is a, c, g, or t
aaagacaaagtaagatgtatgtatatgaaacacaacatgacaatgtcaaaaaacaaaaataaaatcctaaatttttacataagcagctttttttccaacttgcatgttaccatccatcacatttttcttgttttcattttttccgggtcctaccctacgcattattttttgtattttatttttcttgttgcggtggttgcccgagccaaacatgaaagagaaagggatataaaagttaagataaagagagaaagctgtagtctctagagagaaagaaagagagagtaatagctaggttaatttttggccatggtccatggttgtttcagaggtgcttttccatggagattttaaggtcagaggtcgtagttgtggatgtgggcgtgcgcccttactcttcttaagttgcctacaacgtctaaccctgtggggcccctaagtgatacccgcatacacgtggccccacacacatttttttttccctcaacagttaaactctcttcctccatctttcttggtaggtggcacttctcggagcatagtaaaactaaccccacatttttctttttcattttcattttcattatattataaacctatatatatacccaattggttatttggtgttctggtgtcccttcaacctttaaaacaaacaaatccattttctttttcttttttttttcattntattttttccattattttatcaacacaattaattccatgtgtatcctttggtcctttctgtcccacagcacatatatatagtctcgctttaatactcattccatggccagtacacacaccacacctcattatattctttctttcattcctatcct

SEQ ID NO: 6428 - DNA, 847 bp, Glycine max
cctgtagagtcgacctgcagagttattaatacaaacaaagtgaaacaattgaaaatataatgctgtataacaacttttaatggctcctgctgaagaataatactaaaagaaaaagaaagcttaaaagtgaattagaggagaaaataaagagaaaacggaacagaatatgtgaatgacatatagatgtgttgcattaccgtttacaaaattctgtcaaaatgcaaaactccaatgagaatacttaaaaagaaactatgatggatatgaaatacccacctgggttttcagaaagcatcagattaaggagaagtctcttccttatttcttgagcatggttcacttcacgaagaaaaaaagcattttcctttactcccttgatgccaaaagttaaaggctcagatcctgttgcaattacaagcttgtcataagcgactttgaattggtaaggctcttgaggcaatccaccattgttaactgcctcacaatagatctgttgacatgaaataaaaatgagtaggcatttcactagaaaaacttctgcattctatagaaaaacttggtacaaacataggtttatatatctcacattgagcattccatgactacatgaatgtccaaagaatgtaaagaaaacataggccaaagggtgtatatcatttcactcacttcatgtttgcctgtgtcaatgccagtgcaagaagctagaaagaagtaggagttagggtcccttgctaatgcatcctgtattctggatacaggctcagtaacagttctgaattccaagggttcaacacacgttgaagcagcaaaggagtaaagacatgtgattccttggtgatatgcacac

SEQ ID NO: 6429 - DNA, 849 bp, Glycine max
gcagaaacaacatgaataaatacgctgtaatttaactactataataaaggatgatataaattatttaacgcttactatatgtcctaattgtaaacccaatcggaggctttcttcgttacccttggatggtgggtgtaaattatcaacaagtaataaaaaatttcgtaatcactataacctataaaatggaaatacaaaatcgaggataagatgtagaagaagcaccaaccacaaggcactaactaaaagggtgatccaaaaatccgatgatagaatagcctttcagattaataaacgcttggttctagacgattgctagattacaccgcttaatgccaaatcaaactgtggatagaagcacaccacattttatttattttattttgaaaaatataaacgtccaccccattttgggtggattgggtggagggaagagagatggagagcaaaagaaaaaatacagaaaaaaattataaatgtgataaaaaaaatgtatatagatagaaagaaaaataggataaaaatgagttatgagaaagtggaatgtaggagtattaatttttttaaggatttaagttatcacatttgcaatcagagcagtcccatgagaatatctaataaagataaaactagattaatgtagataatatctattatttaatatatttttttaaaaaaataaaaattatttgaacctaaaaattacttaaaagcttgttatcataaaaaaaataagtacataattttatgaaatttataatgaatttaatataatatattatttaattaagtagattcgttactttttttctgatatataattcaagtctgcagctttagttaataaac

SEQ ID NO: 6430 - DNA, 915 bp, Glycine max
atacatctccgccaaagcagccttgtccggttcgaccggacacgcgtcgagcgagtcgaaaacgctggaatagtaatgcaaagcctccgtgaaccgctccaaaaacccttccccgttgtggttggcttcttgttccacaaccgtcacgattttagggttcagaatccggatccatcccagaacctcttcaacggcggacttcaccgccgtcagccggtgcagctgcatgatcgagttcaccgctactgcttcgttcggactcacctgtaacatccacggcttcacgtcctccagccgccacgccgccacgccgcggaacgcaaaccgcacgttcacggagcgcgccagctcggcgagtctcagcccgatttcgcggaggttgtcgcggttttccgccgaggggggcccgatgccggtgagcctcagcagcggcggtcctccgggccggagcgccagcgcctgtatcagcgctggccactggagcccctgcatgaggttgaagtcgatgacgtggacgcaatcgtggccgttgaaggcctccaagatcgcctggttcgcggtgaagtgcgcgaacttcaagtaaggacacgcctcgtagtagttgtggtagagaacgtcgttctcgtaagcggatgatgctggaaacttgttggagatgcggcggcgcaaggcgtcgatgaagcaggcggcgacttttccgatgccgcagttggtggttgacgtgcgccaacaagccttgcatgttctggatgagggaggcagcgaatgagaagtgggccacgttgcagggaatccgcacacgtcatcagcgtgtgaatgagtcgtatcccggagtggtcttccacggtggtgggcgaatcgggaaggtctgatgagagatggtagtgtgaggggtacgacatgggtttggtccaa

SEQ ID NO: 6431 - DNA, 837 bp, Glycine max
  misc_feature (774)..(774): n is a, c, g, or t
acaatttcttacatttttataacaactttatttgtgtggattgtgtgtaaaatagggaaaatgaggcatcgcttgctgttttacctgacttgctggtggaacttgatagtatggatgaggtatgcctgactaataatcctctgtatttagtgtgttgggattgggaggagtcaatattattctttcatgtattgtattatgactggtagtatatctaattagtgcaatagtcccttttgaagaaaatgtgtttgacaaatccattattttgggtgacagtataactgcacgagttagctttatgctgatagcacactggttcattcatgtaaaatatgtagtattttttgtactcataaaattatgttgcctgtaatctaaaaccatcctttgtttcaggaatcaaggttgcttacgctaattgaaggtgttcttgcagcaaatatttttgattggggatctcgtgcatgtgtggatctctatcataaaggaactattatcgaaatttatagaatgagtcgcaataaaatgcgtagaccttggcgggtaggtgaagttaaacatattgttggttagggtacttgatttctgaatttattcaccacagttgatggttgaatactaagctaactatttcgaatgtaggtggatgattttgatgagtttaaagagagaatgaaaatgccctgtcataagagggctttactttttgtagataactcaggtgctgacattgttctagggatgctttcactggctagggagctccttcgncgtggaactgaaagtagttgacttcctttattttggattatgcattggaccacacagtttttg

SEQ ID NO: 6432 - DNA, 865 bp, Glycine max
acgataaagtaactccaaaatgcctttatttatctttctctttctctttctcttttccattttttccccgagggaagccaaataatattgtatttttgcatcccggatccatgagtggtcatgattttttgttcatgtcatcgatggcaggcattgctagctttgtatcaaatcctcttttgttccaggttgaagatattttgacttttcaatactatttttttctgtacatctcgaacacaagcttttggcagtttatgataaagaataatccaaatttgccttaatatgctacacagtccacgtgttcgaggggttacgatacaaatcgaattaccttaatacgttgattcgagtggggagaaggagacagaatgagaagttgctatgagaagagtacaagttcgccacctctttggttcactccacctgttaatgttttctttttcttttctttctctttctttaagaattttccccgccatatacgcgattcctcaatgatgagatcagcatgtgatgttgtcaacaccagcatgaagtgcacgttgctgcttttgcagctaattcgtggtacccaaactttagaggggaacgaaaacaaaaatgctagcaagagtaacgagggaaaaatagtgatttctaggttaatttcatttcgtgcaagaaataattattggtattttcttgaaccctcaactttagctagctatgccttaaatctgtagaagacgacatttttgacgtaagtcatgaaccattaagtctttctactaaatgtttctgtttgggcacttcgaaatttctgaacacttttgaagaaatatttcagttacatacgaagaaaccattccagaaaataaaa

SEQ ID NO: 6433 - DNA, 873 bp, Glycine max
gattaaaagaaagtgaaaatgaaacataactttggttctattgtacttcagaatatctgtaatctgattattcaaacctttacagagagattatgtgtcaaccaatcagaaatcaccgctattatgatttttaaggtggttactgtaaaaatcaagaagcttacaatacatggtgctttatgattggatgacagagtgtaaaactgtgcataacctattttatcttcttaatgtgataattggattgcaatgcatgcgaatttgcagggcttctgattgtgttctaagaggatggggagtgttactgaagggaagttgaggttttgtattgatagagggggcacgtttactgatgtgtatgcagaaatccctggtcagactgatgggcaagttttgaagcttctgtcggttgaccctttgaactatgatgatgcaccggtggaagggatacggaggattcttgaagaattcactggtgagaaaattccacgcaactcaaagatacccactgagaagattgagtggataaggatgggtacaactgtggcaacgaatgcacttttagagcgcaagggagaaaggattgcagtgtgtgtgactcgaggctttcgtgatttactccagatagggaaccaggctcgccccagcatatttgaccttactgtgttgaagccatcaaatctctatgaagaagttgtggaggttgaagagcgagttcaacttgttcagtctgaggaagaagaagaaagcagggtggttcttcatctgtggttaaggggatttcaggggagcttgtcaggattgtgaagcctcttatgaagaagcactgagccagtactgaaaacttattgacaaggatttagtgtttggcta

SEQ ID NO: 6434 - DNA, 863 bp, Glycine max
aagaagctgaagctatgatgggtagacttgcaccattatcagaagaacccatcaatgaagaaaacgaaggctacaacaatagtaactcaaagaaatgccttcagtcatggaggaactggaattggatcaagactcatttttcccttgccttcaacaaaaagtccaacctcaagatcctccttagtgtcttgggttgccctttatttcctgtgcctgtccaccccattctacccctcaatgaggcaagccctcttcttctctttctctcttttttttctctctaaattctaatgcaccatcaccatgcaagagaaagtggtggtgttgctgtttgaaaacttctgctatatatatttctttttggtgaagagtctaaagacattgtatatatatctctctcatgagaaacaatcctacttgagtcagtaagatacaaacctacgagatataattcttttcgagtcacataagactattgagcggcaaagctctaacttttgctatatgtaattcttcacaagcgcatataaatttcccttcataattaccagaagaaaaaaataccatcaattatgtattttgtttgtctatgaaaataagttgtgtgtgcgttttttaaaagaatcttgctaatttaccttctttggttgaactgatgttctttcttgatcaagattaaaaagttagttgaaagtgttacttttgatcactttctttatacatggaacctctttaatctttatggtgtgtgccaccgattttatcatcttaccatgtgattactgtaaagagggtgtcgtaaagattgaaaaaggttgatatattcttttaagagaatgatagaggcatttcataatgttttc

SEQ ID NO: 6435 - DNA, 872 bp, Glycine max
aacaccaccaaaaagtggtgtcagttctaccttttgagcccttgaccttaatggcgtaggcttagattttaaccatggaatgtcaacatcttggtaaacataccctaactttctcgtgtcaagacaatccttagtcttcacacgcacaaggttcttattctcatcgtagaagagaaacgcggattctaaccaatccgggtctgttaaatcccttcttttcccaccaagtgttttccatatggaccacatcctatcaacattggaatggtggcaatagaaaatggggtctcttgcagcagcatataaattccccatgtcctccattgtagggtggttgatatcaccggtccatgcatgaacaggaccatgtggagtgctctctacggagccaccaccagggttaggctgatccccagcacgataaggatttccgaagaacaatgttggagtctttgcgttagacacaagctgcctatacattgtggtgaggttggtggagatatttgcctctgcattaggatcctcgatagtaaagtcaaggtttacaagtgttggtggttgatggttggcattgcgtagagaatcataaaggggtgatttgggatctgcgtacatggaaggaagctgcatgcccccaggagcatcccagttccaaaatggaagagcaaaggttggatcattgatcaagctcgccaatatcctttcatggaaatagagataccatctgtggtaaggaaagaagagcccaagagaagtgcacttcgagatcaaggtcagggaagccctagttggtgatatccaaccgtcgcaataagcacaatgaactttgggcttggtgcgcgaaactacgtggatcatctgacgggagattt

SEQ ID NO: 6436 - DNA, 846 bp, Glycine max
tccttcctcagtttgatttcctcctcagtcaggtctctatcctcctctttctttcccagctcactcagtttttgctctgccctctttagcttctgctgaatattcccaaactgctctctattccacacttttaatctctatgtcagcagcttcaatttttcttttaatacaaaacctccccacccttgtactgagctctctctccaacaatcctgaactgtcttcctaaaagatttattttgaaaccagcagtctagagtcttgaaacgattgatttcagcaggattggacagtggtctgagtaattcctatccaatatgaattgagtacccctagtcatggtagtgatttgtgaagatattgaaaatttgagtcagcaattaaagaagtttctaaataccccttaattttacagaaatataactgcaaacaaccaccttagtcccactaaggttggctacatgaatcacaggatgcattggactcgatgaaagacaaattagttggagatatttttcaccatgagattcctcttaacaacttcctcggaatccttcttggtctcgccctcctctcacttttcatttagtggaaatacaaaagacaaggataaaaattaattaataccttcttggattaaagtgacccaaaaaaggaacaaattttattatctaaaatgagtgatattttttgaagttaacctttcctatggcctcgaaatttgtgttattgggtgttatcacattctgcctaatctggctgtctggttttgaatgttttactattcattataatgagactgttgaaatatgtatgggatggtttataattaggggtacatgatta

SEQ ID NO: 6437 - DNA, 849 bp, Glycine max
tactttgctcaaccccgggttatccctagatcgacctgcagtttttactaaccaaccaaaaggggtcagagatttccgcacttaaaaagaatacaaaaacaggtatgccataaaatattgaggatttgacattcaaaatactaacctgaagtctcatgctcccttgtctcaagcactatccttctcaaaatccactatataatatatattgctctaaactgttaaaaccatattactacaatataataacagtccctcccttttatctttcccttgtatttatattcacattcaaggggcttatttgttatacagtttcctgacttaattgctcaagtaccaatatttgtttttattataaaagcatgtaccttttgttcttcctaccaatacaaggttctccacaacaaacacgctgatgaatcaatactgggacttcttcaatggcagatgaaggtacaaccttaaccttattctctcactttctattctcttctcttttcagtttgttaaatgtatctgggctatatatcttttataaagggacagaattattctctttcctttaatttttcgacttgtactttatcagaatacagcactgcataaaattcagtttcttaatctcacctaaccctttggttcttttctttcacctcctcacagctatctctccatattgaatttgaaaaagccagttagtgctacagccagattgtgcaaaaccttggtgtaaaatctgtggtcaatcctctgttttgttgctgacattgaagactcttaaacaattaatcaagaattgttctagtgtttttggttctggcaccagttgatctactattgggaatt

SEQ ID NO: 6438 - DNA, 846 bp, Glycine max
tctgccatcacaattgcctctttcttttcaaccaaatcctcacactccttggcctttgctctcagtgcctcaaactcttcatttgacatcttgatcttgccattgaattttgagtacgggactctacccacttcagacaaaatcttcatctctttaacggctctttgttctgctgcttttgcctctttaacctccaccagaacgagctcaagtttttcctctgcttcttcagccacagcccttgatttttcaacttcttgcttcagctcttgaacttttctcctcgtctcttctgcttctcttattgcaccttcagtttccaattgtagcttccgaatcttcgcactctgcacatagaacatatttgcttctaagtcatcaacagtgcctggcttaggccttgcatctctcatgctcccttgtagtttaccagtgaggttagcagcaagagcttctgctatatgtcccttctccttcacttcatcttgctccttcttaacttgctttaattctgtcctaagagaaaacaccagtttcttaagggagttcttttcttcagcaacctcctcaagtgtctttgtggcttctttaagctctgaagttagaagcctcacagaatccatcttagaagcatgcagcttcttaatctgctcttgaagaaactcaatctcagcacttgtttgagcaagtttggcatctagactttgcattagttcagtgtcgtattcattctttaaggactccaagtttttctgtgcttcttccttggcagttttgtaataacccaacaagttggggcttcactttcttcttgggatcgttcagaacaagtctcacttgttcaat

SEQ ID NO: 6439 - DNA, 850 bp, Glycine max
tttgataaaaacgctgaggctgtagatggtttacttgctctgggctttggctttgtggaggttggctctgttactcctgtcccccaggatggcaatccaaaacctcgtatcttcaggttgcaaaaagaagggtaagagtttatattttttttctttgttcttctgcttctgattaacagattgaatctgttttatattttcttttttgacttttccaatcacttctatacaccgcagaaggttgttgatgctataagatgaacttttaaaaagtttgcttatgttatttacattgctctaagactgatcaatttaatgtgcagtgctgtaataaatagatgtggctttaatagtgagggaattgttgttgttgcaaagcggctaggcgctcagcacggtaagaggaaactagatgaaacttcaagcgcttcagcttcttccaataatgaagtcaaacatggtggaaaagctggccctggcatccttggtgtcaatcttggaaagaacaagacaagtgaagatgctgcgtcagattatgttcaaggagttcatacattgtcccaatatgctgattacttggtaaatagtcttttcttatatgtgccttttatagaaaagaaaggaaagatagataaccttatatactgtaatttatcttggtatgactgagtgcagattataaataaactgtactcctttcatgcctaaactctaacatgcttagtaactctcttcacacagttagatagatgcagtaaaggtaggtcagtgacaaaaaatgattacaatcccttactcagtgacaaaaaatgattacaaacccttttctggttgggtttggcatgttatg

SEQ ID NO: 6440 - DNA, 867 bp, Glycine max
cagcttgcatgcctgtcgacatcctattgtggtcccaaggaatggtcgattgaacagtcttgttcgaagccggacaataagatttccccttccttgaaaaaattggtgtttggctgtggctgtgatttcaagttttcaacaattcaataattcattcgttgaccctattagaattcagagaagaaatgcaagtaatgccccattggatgaggccaaagatcataaaactcgaagaatagtagaggagttccatagaaaacactcagtgtaaaatggttgataaaagattatagttatacaatggaatgctcttatttatagagcacattcctatctaacttcttaactgaatactaattttctataacctctaatagaaccccttgatttcatcatgatactagcatgtattttaattgcagccttatcctgatcttgaccactctataagcaatgaggagttactatatctagagtcatggtttgagagacagttattctaactcaatggctgaaagatgttggtgaggagagaatcacaagtgataagtatcttgcatcgcatatttatggtagatctaatggggaaaccttctgattgatctttgcattcgattcttgtcaatatttaacaaatttctttgacctcagctaaacatttcatacatctaaccattagttttttctttttcctatatctcacaaaaacactatacttctgctctttttcgctttgggtgaatggaataatctgctttaagctaaagatttaatttatgaaatttaaagcatgatgatcatggatcataattaaggggatcaataatctttgagctgaaaatagcttaaatgtaagcacctgaaaaa

SEQ ID NO: 6441 - DNA, 847 bp, Glycine max
agcatttatgatttggacacaaaaaagtttcaaacttttcagttctctgagtttctggtaagaactggattcgtttccatgtgtgatcgtcagaatttgaatatactattttgtgtatgataattataaaattcaatgtttttgttgatatgttttgtgggtgttgacctaaccacactctagttgtgcttgtgcatgtgtgtgtgtctgtgctttctgggaatcttattttaatgatggatgtttgttgaatcgatcttgcctatgttgttgctctagtgttttgttttgaatcccatgtcttattgggcattttcacaaatgacaaatctaatagttgtgactggtgagtactcatttcttgttctgatttctgagctggtttagccacattgttcaccccaagttcaatttgactcaatgtcagttatgattttacttttacttttgaaaagcatgcctggaactggaattaagaatgtgggttttattgtatccatgggtttagattcaaaagtgaacatctttgtggtgtgtgtgttttttaatatgctatggtgggttgatttcggattcaggactgtggtcaggatattataaaatatgctgtggaaatggttgctcctgctttttcctttttgttaagtaattggtaatttgctatggcaatcttgtatatgcattgttatgtttttcaattcaccttatcaatcttcggtaattagaggggtctgttagggaggaactattcctgatctgaatgagattatcgggtgcttaggctaaataatgatttattttttgacttgggatcgaggattggaaattttaacaggaaaagttttaa

SEQ ID NO: 6442 - DNA, 809 bp, Glycine max
ttaaaaaaagttcccagatttgaagaaacccacaatgtccaaataacatcgtggtggtcgcggtggccagttgggtcttgcagtcgaagcaggccttatgtgtggggtcggagaatacgtgccacgcatcgcacacgcccatgagggcctcgtcgcgggcttggagaaccaacgcagcgccgtggcaaatggacttggaaggcgtcggagagagttcctcgccgtcgtgcgcctccaccagctacaacaattacgaccgctggatcagtgtctacaaccgcttagatgaaaccggccacgaccaacccatttccaaccccgagttccgcgaacagttggagattcacatgaatcacttgcctcacacgtggatcagaggaagaacacaatgttctcaagatccctttagtggtcaccgtggatttgcgtggaagagagaacaaagttgccagccacacaaacttttagtggacagatattagtgttcagatataaccctacctaactccggaccaagaaatcacgcattgatttttacgagaacgaatttttacaagaattaaaaattcgaattttaccaattttacggataaaaaaatatattttaacttattttttaagtcagtactattagacaattatatattttgcataattttatttttttcaacattttcaatttttttaaaaaatatttttatcatcctaaatcttctttttttttttaaaaaaaaaaagacatttttgaacacttgattcttaaaaaaacgtggttcctacgagttatggccttaaagaatactagcgga

SEQ ID NO: 6443 - DNA, 858 bp, Glycine max
aaatcagtcaattttccaagaaaagaggtggcatagatatgaagttattcatcagatattgtttcagtcgtggtcatggagcaaagaattcataagtgatgttgagattgtcttttgtgcaattctctgcatgcataaggggtacgtaacatctagggtaactatcacttgaattggagtgcaattccatgcattaaaaagaaagctaaaattaataaagagctctacaacaaattttaaaattcaaacaaagttttcaaattctcataaatgagtacagttacaaaagatattaaaaacacctaaaacacataattttgaaatgaaatcccaatagcaacacctatcacaaatgaactaatttgtatgtctaaaaagcatatgtaatacgcgacaacaacgactgtatagtgtgtctaaagaaaaccagcgtattcaataacccatatggttttaattaataataataatattcataggatccaaagtttctgcgccgattgtaccacaggagatgtgtgttgtttggatttgtgtgcggggttacaccgataaaaagtgattctgtgtcaggactaaaagatactccagagaccagtccgaaaaaaatccaccacctgcttcttctcaaatctactcgcatcatagatatgcacaaagtcaactgtctcacccatagccatatattgtccatcagctgtgaagcatagcgagcgtatagcttctgcgttgcccttaagaacgtccatagactctgatgtcttcctaatatcccaaatccgacatgttttgtctacgctcccaggggcaaatttgtatccatcaggatgccatgcagatgcataccacatatccgag

SEQ ID NO: 6444 - DNA, 820 bp, Glycine max
tgatacgccagcttgctgcctgagttagcagcttctctcgcccattgttcagattttcccactgcaccaaaacagcttttcgcataattgattttaagaccagaagccagttcgaatcccctcagaattgatttgatggtgatgacattttgcaaagatgcctcaacaaaaaatatggtgtcatcagcatattgtagaatgctgactggaacgttgtctttcccaactagaaattcaaaaaatagattctttttgactgcctctctcataagtccggttagaccttccgctgcaatattaaacagcaaaggagccagtggatcgccttgtcgaaggcctctttgcagagtaaatttagaggttaggacttccgtttaccaaaactgaaactgaagcagatttgagacagtcgtggatccattggatccacttattgcaaaagcctattccgagcaacatgtataataggtagtcccacaaaacagaatcataagccctttcaaaatcaactttgaacaccaaacacggtttgtggcccctttttgcttcctctaccacttcattaacagtaaccacactatgcagcatctgcctaccttctatgaaagcagattgtctttcatctatgagggttggcaatactttcttcagcctatttgataacagtttagacacaatcttatacacgtagccaataagagagataggtctaaaatcatttaggctctgaggctcgggcacctttagtactagggaaataaaagaggcattgcttccctttgggaaaattccgtttgcatggaattcatcgaggaagcgg

SEQ ID NO: 6445 - DNA, 849 bp, Glycine max
aatgcttgtgctcttgaacttcttagggtagcttcaaatcaaatccatgataaaaatttcatttacacagtgcttcatctggagaaatatgtaatatatattaccatattgctacaagaaatattaaaagaaaaaataattaaatctacttaaaacattgattccccagttaacaacactgaataaaaaaagaaaccaaattagttcagttttagcagcccctccttaatcagttagtccaagttgaagtatgaagaactaggtacctatgaaacatcgacaatgacacgaacaccgaatactacacagacacgtgaatctgtaatgttcaaaatatagaacgtaatacaggtgtcatgtcgatatcggacactgacatgaatgtgtgttggacaccgaacacgacaaggactggaatgtccatgcttcatagctacgtaccgcgtcttcttttttcatctccaagataatttcgtatgtcgtcttctctgtcccccgattcatggactttcttctccacctcgctattctcttaacatcagtgtcaacgccccgttcaatgaaaatatggtgcaagtactattcgtttctttacttaaaaataaaaaattgacgccatattcgatattgtaatgttcaaatgaaatgtttcaaatcatactttggatcagagtaaagaaagttacttttttgcttgaactagaagcatctatagctaatattacctatacagactttaccgatctatattgtctcgctctcacttatgactccacaatttgtctttccctctcacttatcattatataatcctaacacaaataaaaaattctaaagggaatatatata

SEQ ID NO: 6446 - DNA, 1068 bp, Glycine max
ttgcatgcctgtcagtgcaattaagaaggcatacaacacctttctcttttggtcctctcctgtgttggtctctgctgcttcctttggggcatgttactttcttaatgttccattgcatgcaaataatgttttcacttttgttgcaactttgcgccttgttcaagatccaatcagaaccatccctgatgttattggggtggtcattcaggcaaaagtcgcgtttgctcggattgtcaaattcctggaggcacctgaacttcagagtgtaaatatcacacaaaggtgtctcaatgagaataagaggggttcaattttaatcaagtctgctgacttttcatgggaagataatgtatcaaagccaacactgagaaacataaatttggaggttagaccagggcaaaaggtggctatctgtggagaggttggctcaggcaaatcaactctcttagcagcaattctcagagaagttcctaatactcaggggacagtaagattttattccttttttgctattatttttatttgcaaattgtgatactttcattggttcataatttagatgaaattttcactttgtgtcagcagtgttataatatctagcacataaattcaactcactagagtgcatttttctgtccttcattagagtagtaatattattaattgatttcattaatgggtatctgattttcttttctgatttacagattgaggttcatgggaagttttcctatgtttctcaaacagcatggatacagacaggtacaataagggagaatatattgtttggagcagctatggatgctgaaaaatatcaagaaacacttcataggtcttcactattgaaggatcttgagttgtttccccatggtgatctcactgaaataggggagagaggagtcaacctgagtggaggtcagaagcagcgaattcaacttgcacgtgcactatatcagaatgctgatatatatctcttggatgatccattcagtgctgttgatgcacatactgcaacaaatttgtttaatgtaacaaaaacttctttttctcaggtactacatttataac

SEQ ID NO: 6447 - DNA, 865 bp, Glycine max
actgtagctacttatttggttcgtgcttcttggattcttgctgggacgcggtaggtgccaaagtgcgatggtggggtgcgacggtgaagggagacgtttggtgccagagtatgattgtgcgacacggtgggtgaagtgtttttcagtttttccccctttttgattttggtcaaatgtcaattgcttttcccttttcactgataaggctcactccaatggcagtattgttgagactctgcttatgaaccacaagtaacgattacaatttgtcctctgtaatgtgcagattttggtctttacatggaaaaaaatattttttggtccttacggcttgcatagttacactagacacatttagtgagatttttcaatatagtgaccagaatgtgaagtttattcatgtagggatgcaaacaagaaatgatgtaaagtgtggggacccaattcttttaatttaaccttttttcttttgcgttggatttgtagtaatgctcttttagctcaaaatttcagaaaaaaagagtacattccgacaattgaggatagcatacatgggtgctattgtcgactactggaaggtttattttgtttacttagatattttttatggtgtccatattccataatgatgtttatggtatacatcactattattactgcgaaatggttaaatgtcgactagatcaagcatgcaatattgcctttttggtttagatatttatttttggtgttttagatatgatctagaagatgaaatacaacacagccattgactgttgtagcttaatatgacatcgacacagatcaattctatatgtatccaatgtcatttgaaaactgtattagctagcttccattacctctt

SEQ ID NO: 6448 - DNA, 879 bp, Glycine max
  misc_feature (809)..(809): n is a, c, g, or t
agcttgcatgcctgcagggaagcaaatatgaagagaaaaaaaaagtaaaatgttaaatatctatggaacataatgatccaatagattatcttaacatactcttgcgtagaagtccggaggtgagaatttatcaaagtgtgtatgtttgaaatcaagaaaccatccttcccccatatatatagtcacctaaataagggtaagaaaagtatgagctttgttaggatctagattctagactacagaaacttggaaaggaacatgattcatatctccatgcagtaaagcttataccttcagggttgtcttcacaggcaaatgagatctaggatcaaagacctcattatttggaccaacctttaatagaagatctggttttttaacataaccgcatccgccattggctttgaacattccctgcatcaaccaaagagatctaccatacccctgtcatggaatggaaccatggaaactgattagtcgaaatctttcatgatctcagtatcattagtcaataatagactgcattatgttacatgcgtgtaaagctaaagtcattgacaataacatttcatccttaaaaattttgagttcggcaagtttctctcacccctcaagaaatcaaatacaaaaatgaaatagaacaataggggtggaagaagtagaaacctgcatgttaaatgcaaccatctgagctccatgcatccacccaatcaatgggttataatttgtcgaagtaatgcgagtaccttttggatacactctcagtatattccgctgagtgaacctgccaacactcaagaaataaatancttctcttttcatttgcaaataacaaacatcttgtttggggtttgcttcaaagctaaatacaggagcttt

SEQ ID NO: 6449 - DNA, 842 bp, Glycine max
aataacaagattaggggcaataatataacgtccaaatgcaaaactgtaacaatggaatctaattggcgccaactgtacaggactctcattattgttgtgaatgaaaaaatttttaaaaaaaaattcaaaatgtaagcaagcacatcacacacttactttaaaaaaaaaaaaaaaaaacacatcacactgagaccaattgatacagtaaaactgaattcgatttcattaagcacaatttagttcaagtcttatgtacgaataaaagtatttggaatgagagattcggttaatgatgatccgtcgtcataaaaaaattgaaagatattttacatcaatgacattattacccaaaaacacgttaaggaaaaaagttgtttccacgactagaaccatagaagaggaaataatagcagcatttatatgatttatcaagaaatcactgaaaggaattattagtaattacgtgaccagcaccaaagaaaagcagaaaacagaatccttgcttttgttgtagaagcacgatggtggaacgccagatatcctaattctacttctcccagcttcggaaaatgcattttggaatcaaactaacaaaaagataagaagaatgtattgattcgattaagtgggtcgagtcatttgcaataatttttcctttcaagaattaaaaaattgcagcatctgaattgtttagtctcttgtgggttttccagttgtgatttcaaagtttatcttagcatattaatactatattgctaccagggtaactaatgccggataattcctcgggatatgaatagaaatcggatgagtttaaaaacacaaataggatgattttcccc

SEQ ID NO: 6450 - DNA, 838 bp, Glycine max
aaataagaatttaactgggactgctagatatgcgagtatgaatacccaccttggcattggtatgtatggctgtatgattcttacctggcattgattaatgtgtggcaaaaagcaaagttatgtcatctaacagatacacattgcttggtcctttttatgatcaatgcacagagcaaagtcggagagatgatttggagtctcttggttatgtcttgatgtatttcttgagaggaaggtgattattgctgtctaccttgcattgttatcatcaagtaccgtgctgagtgcctttgatctgatattcattttatacgtagtctcccttggcaaggacttaaagctggaacaaagaaacaaaagtatgagagaattagtgaaaaaaaggtttctacctcaattgaggtgggtactgttattattggcctccttgaatccatattttgcactatttcttgaattatactgataacttgttgattattccaggccttgtgtcgaggttatccaacagaatttgcatcatacttccattactgccgctcattaaggtttgatgataggccagattatgcttacctcaaaagaatatttcgtgacctgtttattcgtgaaggtgtgaaactaatctcgcatagagtgcatcactttttgtctctggccttgagtttattgggtatatactcttttatgatttgcttttcaatttatgaaagatcatgtgtattttatcaataaattgacatgtggacaggattccagtttgattatgtgtttgattggacaatcttgaagtatcagcaatcacagctagctggctcctccagcacgtgccattgta

SEQ ID NO: 6451 - DNA, 901 bp, Glycine max
cgccaagcttggcatgcctgcagaacaactcttggagtttgcttggggtttggccaacagcaagaaaccctttttgtggatcattaggcctgaccttgtcattggtggctctgtgattttgtcatctgagtttgtcaatgaaactagagacagaagcctaatagcaagctggtgtccacaggagcaagtgttgaaccatccttcaattggtgtattcctgactcattgtggatggaactcaactactgaaagtatttgtgcaggagtgccaatgttgtgttggccattctttgcagatcagccaacaaactgtagatatatttgcaatgagtgggaaattgggatggaaattgataccaatgccaagagagaggagttggaaaagctggtgaatgagttgatggtgggagagaaaggaaagaagatgggacaaaagaccatggagttgaagaagaaggcagaagaggaaaccaggcccggtggtggttcatacatgaacttggacaaattaatcaaggaggtgttgcttaagcagacaacattggaataatgaagggattttcactttttctcttttttttttaatgctttactgtgataattacttgattttatcctctagaatttgttgccatgtagaactaatgcactggttataggtgctagtttgtgtcttctttgtaaagatacataatgtatcttgacatttcaaactgtgattcatagcatcacaattaagacatttgtgacaattttttttattccgtgtcactatttttacgcggggaacaaaaattcgcgaaaaaaaagttttggaagaaaattcacttcatttgggaaactttaggtttaaaaagtccacattagccttaaaggtaaaggcttgtccaaatgaaaaaaa

SEQ ID NO: 6452 - DNA, 812 bp, Glycine max
atgatgaagaagcatgggggaaggaagtccctagtttgagaggtggcactatctctgattacaaggtctgagactaagtgaatgatgtagactaactgccactacatttaattttgtaagggagggattggttgattttgattcttttttctggcttaccatcttttgcagaacattgaggatgatgatgttcttgatgatgaggaagatattgatgaagcagaaaagtcacgtcaggatgcagcggacgaatacagacgtttaattgccattcatgctgggaagcctaaaggcggattaacggaatgtctcaaagtggatcctgataaagtgagacgtctaagtttaagtgagctacagcttgaaaaggctgctgaaactcatggaaaagaaattgtcaggtattgtgtcaaatgtttccagttatttagtccttgagagattactcatcgtctcatttgcatgtgcttggcttccctcaatatgatatgaattggcaccgttatatgagtttttgttatgccttctacagtttcacaattaagaaataggaggtagatgcaatttctagatagtccttgattatgatttacttacagctctagtgtctgactacttaatactttatgcaaatgacacctatctgatagagttgcagcatcttcaatgtgagttgtttatggggctcttaaagttaagaaccagttcttatgtagtttcactattggagtagttgacgtgacacaaggaatttatataagaactgttgcttatataatcaatgttttaacatttcttaagaattgtgagac

SEQ ID NO: 6453 - DNA, 866 bp, Glycine max
atcagcatatttcaggatagcttcccttggatcttcctccatccatgtctccttgatcataccacctttctgcaattacattaaaatgtaagtaccttccactgtcacaatctaaagcatgaaaactgcaaattcaagaaaaataagacggaagaaatgcgctcaaacaacaaacctttagaagatactgggtcagtaagcttccttgactagtaccaactcgtccaccaaagccaggacctgtcataggtagttcaggcttatgggacttcaatggatcctttagtactttctctcgctgacgcttacggctaggctgatctctaaatagtggtaaagcatgaggattgtgaatgacaggttttgcctcaaagtcatcaattgattttttccttggtgcacgtgcaacacatacaagagctcctctttcacttacggttggatcatatagtatgtgagtcccaccttggcttttatcaccagtagttgcaaagatctttaccgataaatgcaagttcaaaacgagttataagcaagagcaacaaatcctgttcagagaatgcaagatgacaccagaaaattgttaagtaacgtagctgggatattatgttacctgattcagtttgggatgccaagaacactgaacaacactacaagtgggtgatatgccaacttttgaaacaagctcaagatttactctatcaaagaagcacaataaaacctcctgtcatgctctccctttccacagatgttccagtcaaaaagagtcgctcatcaggactgaagcaatatttgtttgtgcatagtgatttggcagatcctcaaatactttaatgggtcttttgttttgcgcagatcccaaactg

SEQ ID NO: 6454 - DNA, 818 bp, Glycine max
caaatgtacacctgtattaaacaaaatttggaggtgatttaactagtagtaagacgtttactaacaataacaatgccttgtaaaacaggtgagtaggctataaggaatgtctatataaggacacaaagaaaaggggactacctgtgaattctcactaccactggcgataaacgtgttattcaatccaccaaagcatgaccttatcacatatttgtgttgcttgtggcccataaacctcaatggcttatcccatttcccagcaacatcccacatatgaatctcttggctgtttagattgacaatgaagaacttgctatctcctgaaactgaaagggatgtgattgggtgctcctctgaaatgacttgctcggcactggttcccatgtgcagaatccgaatttctttatccatgaatatgctgataagatactcaccatctggagtaacagcaagatcgacgaccttgggcatcctcattcctatccatgattttatcacgtttccatcacaatcccacatgcaaacacccttttcagggtcagagctgccacacccaaactgttttgagttgggaaaccaggcacaagagctgacaacaaaaccttgattcccaaatgtgtgcttgcatgtacctgtttcaacatcccacggcttcaaaacttctgtgttcccacatgtaagcaactttggtgtcatcaggactccatgctacaaaagatacagcatggttggtgaccacaaagtggtgtggtttcaatggcaatttcccatccttcaacacctggcaaaagtatttcataacattataaatgtttgaa

SEQ ID NO: 6455 - DNA, 783 bp, Glycine max
attatggttccgtttacggcaccaattatggctattgagaacattactttacattcaattttaaatgaggagccctacgttttgtaaacattgagagttcaatttcagttctagttctcgtgggtattgcaaccgggcctctgcgtgtcctgtgtcttatatcccctatattttcgctgtactacatttggcataatgactgaataggatttagagcatatgataatttggtagtttttcatttgctcacaactaactttttatagggttttttttaatcctaaaaaagatttccctgctttgatccttatagaaatgttttcgtataattaaggctaaaaaatgcacttagtcatttatgtttgattatattcaggttgatcctttatttattaaaaagtttaatttagttagttttaaaagtgaatcaaattcaactaaaaactgaaaaatttaaaacttaatatcatattcttttatagtttctcgtgattttttttcacatgattattatcttgttaaaaaagcaacaaaacggactacttttgtacccacttttacataccatgtagaaattaatgaacatactacatgtgcagatacttttttcgagtattttaattacaaagaagtgcctgttatacataagagtacattatacacgtggcaacctagcagagtcagactttattaacactgccaaaatttaaattttagaatgtttgcatttcaaaaactaaaatgagaaacataccaattttgacacaaaaaaatctgaaattt

SEQ ID NO: 6456 - DNA, 836 bp, Glycine max
  misc_feature (639)..(639): n is a, c, g, or t
cagacttgcatgcctgtcgattcaggaggcaatgcaaaaatcaatcaaaatggttagctacagagccaagcacgagaaccatgaagcatgcacacctctcttgttcgccgcgtcagacgtttttaacaccttcacacccaaacacttgtgcgacccttattaagtgcctaatttaaaagttatttttgttggcttgaacacttaagttgtcacttttacacaactcacacacttgaaaaaacatagaatatttgtttaaaaaaatgaatattccatcaatttagatattttattgtatgtaacttatatttcattttattagagtctctatgtgtgaatggagtgtctctgcatcctagattttaaacattagccatgtcaaagtatccatgtgagagagttcatgcttcatgagaattctctacttgtaaaaagaaggcaagggttaaaaaagaaagttacttacacattgagtgttgaaaacaacagtcttgcagtcaggaaggatgctaatggaacgtggtggcatatagtagtccgtacctctgaaacttatggttgttggtactttggtggtggttgttggtgatgaaagcagcacataaattacttcctggcttctcaaaaactataacctgngaaatttatgttgagaattttataatttctaattaattaatgagttaaatattaagtgatctaatttaatgagtccattaaactgccaacaaaaaattgagatggacttagtgaacggaaactagttttgatccattaggagataatgagaactaaggtatggctatgattctcgatacaccaaacaaagttcgcat

SEQ ID NO: 6457 - DNA, 832 bp, Glycine max
  misc_feature (672)..(672): n is a, c, g, or t
  misc_feature (695)..(695): n is a, c, g, or t
agtgaatccaatccataactgaaggttaaaaatgtttagcacacttgaccccggatatcaactcacaacacatttatggaataaaaacaaaatttagattgtagtaacgtgtgtctctatgcacattgtttggcagcattcaattaaatttaatcaattgatatgatactaaggaggatgattttatatatagatgactaactgtacaactcaattctcaaaatcatttcaagcagatgcagagtaccaagtactaacaacttaacaagtgacatgtacagttaactcccaatccgcgattttggtcctgcttttttttcttccgattttcttcttccaaatttaaaaaatctaccattttaattcaatcatcaatttcgcatgagtttttcttcttttatattgctccaattaaattctagacttaacatataacatattcactaaataatatatcaaaaaataatttaattatttaaaacataaaaattaaaaaaaagaaatgtataaaaaaatctcaaaagaccaaaatcatgaaaagaaaaaaataaagacaccaaaattacggattaaaaatggacttaaatatatttttaatcctataaattaattttttttaatttttctgattttaattgcaccattttaattttgatcctatagatattttgntcattttttttcttataatttgnatttttctaattttattctctataacgtgaacttaaatgaaaattcaaaaggaccaaaactaaaaaataattcaaacctacatgaaaaaaatataaaatatcttacaggaaaataaattaaaaaaaatattaaatat

SEQ ID NO: 6458 - DNA, 835 bp, Glycine max
atactagaggagacagatcttcacaaggcttttacatcagttctgttattaccattgtgttgaaaaacgagataattgaaaatggtgtcaaaaaacgtacataactatgttttaattactaaggaggtctaaataattgagaatatacttaacattcctaaaataaaaaaaatataaatcattatcattatgaattacttcctatctattgtttataaataaggatagttctaccaatttcttgaaatcatgaggacaatttctattttttattcatcaatgaacatatttgaatgtttcaatgttatacacatatatgtctcatgcatgtgcttcattaaatttccatatatttttttaaaaagtttggtgatacttcattaatacgcatatgtaaaatatccagaaataccaatatcgtaacgtatcgaatatggatacttaaagcaaattgcggggctaccaagcataaaaatgccgtttcttaaactcactggttgaagattttgccaaccccatgatttgctggtcccattgtctaatctagtgcttcatcaggacacttgtctttggcatgacgtaactgaacaactttgaaactcaatagcctctagttagttacctccaatatattcatccacacaatttaattaaactattttttgggggtaaataataacactaattttgattgtgaatgatacaagtaacttgcatacatttttatactaacagaaacaaaaaaaagcatacaaattctaaaagtaaaaaagttcattccattttaagttgtaaactcgatctatttctattccatagaatagcgttacgtgta

SEQ ID NO: 6459 - DNA, 898 bp, Glycine max
tttgcatgcctgcagcagcaccatataaagggattaagccaccatgatctagtgggcgaggcaaattgccgtgttcaccattctcaccaccatgcattcccatgctgcttgtatgatcaccaccaccgcgcctattaactgatgctatagtctctgttgaacttgttatggccattgttcttgccctgtctgtgaaatattataacataaagttaattatcattggatactttcaattatctatgttttatttaatgagactatatctaaagtatcctttatttaataaggttaaatatttttttttatgtttgatatctaatttctgaaaagaataatttaagaaaaatgatcattttttatttgggattcacaacataactaatttcttaataatttatatatatatatatatatatatatatatatatatatatatatatatatatatatattgcttataatcaaaattggagagtatttgagatcggatggagtattattgttttttttaataaagaagttataaagagagctaattatttttttcaaacaattaataagagattataaatccacaagataaataaaaattaattattattttcaaacaattcatgcgatggtcaaagttagtttaaagaggttgtagataataataaaaatgattaatttttgtatttctattttttaaaatttacgattttagttctcttatttttttattgaaatatttcatttgacattaattttagtcatctctcgcttttagaaaaatttgtacttttatttcctatggtcaattgatctatatgtatttcctaaacatttatcaatacatgtttggttattattcatgtgatacctttttaaaaaaaattagttagtttggtaacaa

SEQ ID NO: 6460 - DNA, 824 bp, Glycine max
aatattgcgcggtagtacattgtttttttttttacgcccaattggcctagaactgtccaaatttcaacacgcccaacccttcaaacacaaaggagcccattcagttctggtgttggtacttcagtgacacgattttagacgacgtattggtgtactggactactaggccattagcatgttaatcactgttaaagaaaaaataactctaaataataggaagatttttggtgaaatttattcataatttaatattatactaattcataataactttattgcaaaaagttttataccaaaaaatgctgctttttaaagaagaaatcacgaagaattcaagattttgttccttcttgtttgttttgttccaaacctcgaaatatttcctccactaagataattatttagttttaaattttaaacagttgggtccctttcagacaaaaatccgcgtcatagataagaatgcaatgtcatcataataatccgaacaccgtatgttattaagtctgttctcggaactggaaataacgaggaaaatgtccaccaaggccatggaaagttgctagttttgctctagaaagttagtcaaagtaaacaaagcatttttaagttctcaaagcataatattaagctatgttgtattagattgtgttcagcaaactagacccagaatcatatatattattatgaagtaaggatctttatttatatatattttttatccacaaatattagttattaatcgttagtttttgtattaaccgaagaattgatttagaaattttttctttctttcattcttcatttatcatccaacccatttt

SEQ ID NO: 6461 - DNA, 837 bp, Glycine max
aagggataagaagcactacatataagtcctaactgcaaacacatgcgttaagtcttaatttcttccattgggttcattttagaagcaccgtttcatgactacttgcgtttcttccttggatcacacggaaacaaattaacaaaaaattcaaccaaggactcaaaaaccattctcttgacggatttccttggagcaggaatcaccgatgcaaatgcattcttcttgttcttcacctttgtctcgtactttttagtactcattcctgcaccttgatccatccccatatcctctcactcaccacgtacgctctctcttttctttctctgagtttgtatatctttgtgcttcgtaatgagcgcactgcttaccaacgtatataaataaaaagcagaattgcataggaaaagatcacgaagtatcctcgaaaatagtctcaattatagtgtgtaattttgccaagtagattcctagtttattgtagtagggccgcatgttcgcacgttcaatgtgaatgtggaaaaaaaggaccagaatctatctttttcgatcattgccttgtctcttttggcatgtccccattcatgatctgtttgatcaaatactattagggtatggtatatatgcgttaacatgagataatgttgatcagattatacatggagagtttgagtattagaacgtgatttattttatttttgatgttttgataaatttatagagaataaaatatgtttttgatttcgataaaatttattatgtggtttgtttataataaattttttctttacataaattcctaataaataatatttttatttttagtcattgcattatttt

SEQ ID NO: 6462 - DNA, 845 bp, Glycine max
aaccactttgaatcttgtccatttgtagatggagattgatgttttaaagagtgatgtttgcaattaaaagtatatttacttgaaaacatttgttatttgttattttttattttgaaacataaagcattattcttgacttttaaaatttaaatatacaaatattttctttttccattttgaacatacatttcttttcatctattttttttttcaaatgctactcttagatgttattctctaacttgtaaaaaaaaaagatgttatactctaattaaaattaaaattttctcgatacttaaaacaataaaaatcaactctagttaccaaagtaaaattatatttttaacaaaaaaatattaccaaaaacacttaaaaaaatatacttttgtcttttgaatccccatgcaatatgcaggataaaacttaaaatccatttaataataataataaaattcaaacatactgaaaaaacaataattcaaacactgtcccgcaagtcttactctcatgatgaaaaacacgaggctttgacgatatcatttcctacaactaaacaagaatttccgtaaaaatggacaaagtgggtatctgaatactatagtagttcaactataaataatacctagttataattaatgatacatgagaaaactaattagtagaaacttagaatgcacagattcagacgcaatgcgattcaaccatattttctccattagtttgttaacaacaatctcctaacacactcttttaaattaaaattattgaaaactaaaactataaaactcattaaataaaaagcaagaaccaccaaattttataattttattaaatttaaccaatat

SEQ ID NO: 6463 - DNA, 850 bp, Glycine max
atcgccagcttgcatgcctgcagtttgccacccatctctagaaccttttgacggaaatttgggccatttcttggacaaggatagaaaagaacatcaaggtccaaaatggcaacaatttctctaacctgtatggagtccaatattagcccgcaacaaagaatgtcactaagacaagtttgttattatgcctaatattctatccaacagataaatggaaaggaaaatatagcaattaatcttgatagtggagagccggattagagttcatcctttgtcaagtgagctaccatgctaacctccacactcaaattccaagaatcaaaagatgagcataatgaatgtttaagatttcaatgatggtaaagaggttatgactcaacatgaaaatccattttggtacttacacttcacacaataacaagtctgtatccagctaactacatgcattgtactcccctcctccctccaaaagttcccctaacagtaaccccatcagttgtttacaccaagacaggaaacagaatcttaaaacagaaggaattctcatgaagaaaacttgaaagagaagtctatttgaatccttaaaaattcatacctttcggcaaaatggacagctgcatatggtccaacatggcatataatcaaagaacaaaacagcacttggaattagcaaattctgtagtgtggcatgtaaaaagccaaaagtctaatgtaaaggtacgaaggcaaaacagaaagctagttatctaactttgctttgggaaaagaagaaggataaggaagtatttagtccatgcatgaatgcaaagagaataaattagtgtcagagaaaataaagtacgtctcaaat

SEQ ID NO: 6464 - DNA, 810 bp, Glycine max
aaatttaactgggctctgtactttctctgataaagttctgaactggtgttcaagctgctttcaactttactacgctttgcatagcttcgattatgattgttttatatagcttaggagcgcggaaatctaactacatttattaaaaaaagaaaagaaaacttagctattgaaattaaacaataaaattaaatataaccacaaaaattctgaacccttagatggtaagttgtggatcgtgtagttgcattttaattgcaggaaatcttattcggttgttttagaagtatcattttgggtatgattattggcctttttttttttccaaattaatttaagtataaattctaattacgtttaaaagtagcaaaaagactctagcaaagctcagttggttaaaaaaaaaatgtctaacatatttgacaaaattgtttttttttaataagatttttgacaaatttgagtacaaaaatcaaatgagaaccacattatttctcgatgtagaatgcaacagatccagcatccataagaatcacaatctcctcctctagttgtaagatacgtacaaaaaccaaattccagaaaaccgaagcaagcaagaagaaggaacactcgaaccaaaccgttaagcaataatgtcagagcccccaaaaccgaggctagtcatctgcatgggcgacatccacggcttcataacaaagctccaaatcctctggtcgaacctcgaagccagcctcgaccgatccgaattcgaaaaccgcaccctaatctttcctcgcgattactacgacccgaggccccggcacccgccac

SEQ ID NO: 6465 - DNA, 809 bp, Glycine max
aagaagaaggagctgaaatgggtggaatgtgtgtcagagatgaagaaaaagaagtgaaatttgccatggttagcagcacagtggtgtgtgtgtgtgtgatggagaagagttttatggtgaaagagaagaagaagaagaaaagaaccctagaaatggccaagagagtgtgtaaagggtcaaagaaaagaattatacaaggcagggaaagaggggaggaagcagaaaatgcagggaaaatccgattcagacgctttgatgaaatcaacgtatgacttatctcatgtatttttgtctttaatgatgattaatattagaattaattaacttgcttttggatttttctttctctttttgtgttttgatgttttctgtttagccttagctcctaatcctatgtatatgattttttttcttccataagtgatgaactcatgatgagattgccaaaatttgaatgattttaagaaaattgagaaaatattattataaaattttaaataaaaaattggatatttttaagaaaattggatattttaagaaaattgaacatttttaagaagatatccaatttataataaacaatatttttgtggattttaaataaaaattcttaaaattgagaaaacatttttgtgaattttatacatgaaatgaaatgaagaaagaaaaattattgttttgagaatggaaatactttgctttcaaaaagaataaaaatacttttaaattttttcatttaaagtttaaacatgctcatgatcttctaaatttgtaagaattatatgattttttgttataaaatattagaa

SEQ ID NO: 6466 - DNA, 868 bp, Glycine max
gaataaatatacagtcatgcgtgtcaggacctacttggaaacttttagttggaccattactttaggttggccgtttcctatttattcaataaaatcctaagttatggttctgtcacatagacatagcattttcaaggcaaccaagcgaatcacatttgaattattttctcgttaaggattttcgtatggtcgattcctgcggggccaatcaatgaaacgtatgaggattttcttcgataggcacgtgctgcttggatcagagaaaattaatttaagtagaatcgattctgtgtagcactgtacatagagtcatgcttttcccccctcttacagtacgtagacatactaattttcaccttttggtttattctttcatgttatctcacttcaacaaaaataaattatatatgatagaaatctaatataccatacatgagataaacttctgtcatacttatatttattaccacaaaatttgtcaacaatattttaggccaaatcttctgtgatgaacatttaacttaactttttatgttttattttttaaatctgattttctgggtagcatgcatgataaattgacgtgaccataaaagaactgtataactaatagatgtactataaatgaatgttctaaagtttcactaaatctataatcaaacctcaggacccaaaaaaaatccacaatcaatcaaccacagggccaaaaaaaatctataatcaaccaaggatattctgttagaaaggatttccatcttgacacttattaattttacctttaggggaccaactttttattaacttggttataaaaaatttttttctttaggataaattaaaaatttattttaacttttgaaaacttttt

SEQ ID NO: 6467 - DNA, 844 bp, Glycine max
gcacccgttttcttattgtaaaatgggcccttagcataatattttattaaataaatgaagagatgtgattttaaaaatatattatgggtgtatttgaaaatttttactgaattttttgattggagtaaaagatgattaggttacttataaatagtttgtttgaatgatattaaatttaaattttatgaatgaaaaaaatatgatcgaatgattttttttattaaagatgattaatcaatttttttaataaaaattaaatatcaaataaagttgttgaatattttatattaataatatgataaaaaaatgatatgacattataaaataacatgaaatattattaaaaatataaaagataactttgatggatttaatggccggacatactttaatctttaaggaacttaaagtaaagagatttttattagaaaatgaaaaattatattcctcttaaattatttttttggatttaatggcccgacatactttaatgacattctttaaggagcttaaagtaaagagatttttattaggaaatgaaaaattacattcctcttaaattatttttatcttcttctataatttttcattaaataatttttccttttagtatttcaagaatctttctttattacagcacttaacactctcttattttactgcacactatttcctttttttttttttataaatattcttgcctttaataggtttacagacattcacacatttgggttgaagaaaagaaaggggtgtttacacttgacttgagtgagaccgaaagagagtgcgagtgcttgatgttctcaattaattaaatctcacagagaaagtctctctctct

SEQ ID NO: 6468 - DNA, 843 bp, Glycine max
  misc_feature (7)..(7): n is a, c, g, or t
cgcacanttgcatggcctgaatccacctgaaacggaggaaatgttgaatgaaaagaacaactacagggaattgtccgaacttgcagaacaagccaagaagcgtgctgaagttgcaaggctaagggagcttcacacacttaaaggccatgttgagtctgtcgtcaaactcaagggacttgacattgagacaatgcagcaacactacaccgtttgagtgcttgctgctactggaacataggtttagaagacaaaataaaaggagagaaatagacatttttattacattgcccttcatgacgtctcaaatctcatttggattttgaagaatgccaggggctctagaataatatccaacacttcgagattgtgcaacacagtccatggttggggaggtttttttttttttttctttttgccgatgttatcatcaatttgtcttatctttttgttctagaataatcaatcaatgaagatttcctttcttcactttttgccttactatatcactatattgtttcctcaacggaaaggaacaacgtctagatcttgttctaaccaattcgtctcgccctataatgcatgacaactttaaattctccactcaacttcgcgatcgacaaaagtggaattttgattaaaagtatcatagaattcggtaaacaagttattaacaaattatttgaaattcatcaaaacttatcttaacatataaaacatttattttattgttattatcaaatttattaacaattatttatttattctatatgttctaaaatttattaacaagatattaaaaattatattttaaatttacaccaagtaaatatattaatttaatac

SEQ ID NO: 6469 - DNA, 866 bp, Glycine max
tatctataacaacgttcttcatcgcttcaaatttttgtatgtaggcttttggtattgggccgctgaagttgttgaaagagacatcaaagatgactaaacgggggaatccatgcttgatctttaaaccggcaatgggaccgtacaacttgttggctcgcaaaaccaatactttcaattctggtagagtttgaagccaatggggaaacacatcctttatttgattgtttccaagatctaaaacctccagatcaatgcaattggataaagattctggcaaaagaccttctaatagttggttgccattgagatccagagttctgagccgacagtcctttgaaaagatacttggcaaagtgccatgaagcttgttcagttgtagatccaaaacttgaagggatgatgagtttgcaaggcattgtggaatggttcctgtcaacttgttgtgagacaagttgagaatctcaattgcacttgcattgcaaattgaggatgagaagtcaccagtgattgagttaaaactaagatcaaggtaaccgagttgttggttccatgagaattggtgcaatgattgtgtcaataggttatgagaaaggttcaattcagataacgatatttcatgcaaccaatgtggcactctacctttaagtttgttattggacaaatagagtgattctaaaattgggacttttcccgataattttggaaattcagttaaaaccatagaagataagttcaacaactttaaattagagaaactataattgacattggattcgaaatttagtgataaactgatcattcatgaagggtgaaggtcttccaatatttgagcttggagaacgatgaaattgacagatcacttaaat

SEQ ID NO: 6470 - DNA, 791 bp, Glycine max
atttcgtggagctgattttgggtgttctaaaaggactgtgttatatgtaaaaatatatcaagatactggctgaaattttaaacattttgtgcttttgttatgccatggcaggtattctttttcaattgtttctaaggatgaaattcctccagatgaatatgctttggaacttaatggtagtacctacattctcttatgtttagtgctcattattttgcaaaccaggttaattaggtcaattgcctaatagtcattaaatatctggttgacttgcaagtgttacatggatagaggaaaaataatgttacctattattatctggatcattacttttccgttggttagtttttccacgaaatttggataaaaaaatacatgtctgtgtgtgtgaaatatttcgaaagatctctttagctgtcttactggtaaagaaatattatcagatatttaaaattatacatatctcagcaatgcttatcaagttcccaaatacaaccattcatcttgtctggtttgagtgataaagattctgttttgaggtgatagtatctctgcactttgaaaaggagcagaggacactttaacctggagaggagagcatatcgcatggtttttggacctatgaaaaggggtaaaaggagactaagaagtacattggaaaaagttattaaaatggattgtatggtgaatgatatccccaaaaaattgtttttttactgagtccaacagcattgtgtttatgatccatgtaactgacctcacttggtgggataaggctattgtatgggggg

SEQ ID NO: 6471 - DNA, 857 bp, Glycine max
aacgtgcagccagcgcagtattggttaaaaatcattaaattaattggaggattaaaattaatatgaaagtttttattgttatgtgagccttaattttttttacctattatctttgaataattatatgtagacacctgaacttcataaatatcccgttaatatctagtatttcttcttatattttttcttatcatattatattaccaatcatatctacaattctttattctctcttttagcagtcaataatcatgattgtatatgcatgcatcaatttccattatagaacacagatcccccattacaattgttgagtgatttggatagtcaattgccataaacatgtactagctaatctactcctagctaggtagaatctctacattagagagtgaactctcttcttctctttgaaactcataactgaataagaaacagaaaaacagaataaaactaacttctcttacagagcaactaatcatgccatgcacggactcaattgcattgggtggcaatattcttttcttgacctttttccctcgtctgatctttctcttttaaaatgatcatcttacccatccaatttaaaatatccttgcaccaaataatattaactctgacttcaacacggattccacgtttaatgctaaagaaacaagaacaaagattaaataaaagaatagtaagagcatcttaaaaagataaaaaaaaaggaaatgatatgtgagtaggtgaataatttttcagctcactatatctttagtatatattcaacgttcaagagaaagagtgagagagaaagagagatgtcaggaccattattaaggcctcagtttggtatggtcggttcttcattg

SEQ ID NO: 6472 - DNA, 829 bp, Glycine max
gcttttaaactaaggaaaggatacttgaataatgaggaatgtttggtgcacaatggaagagctctccaattccatgaccacaataagattttacctaaggggtcaagggaaaaaaaatgagtaaggaacagatgataaccattcagtgtgaacaaataacaataaatagattaaaaaaattgaagagccaaaaattaaatcattaccaccgagaatccagacattgaagcatgacgattaatgacttcaccaatctcacggaatcgtatcccaggtttaactgaatttgatttaaaagaagaatcaggatcccatagttcaatttcttaaaatatatatatgtttcaattatatgaagtattttaagcacagcaattacaatataatccaaatgccaaatgatgcaatgcatatttacaacatattaagtagccaatatcatatgattcaatatcagttatactcatcatgcccttctgtccttatttatatttttagttaaatgatttattaccttataatttgggatttagaagttaggaccaaatttgtagttttatttataaattgataacgaacctttaaggtacacatcaaacaaaagacaaataaaagatccacaacagctataatgtttcaaaaattcaattattttgaaacttaagcaagagacaaacttcagaatcaaaatcaaatggatatataccaatggatattgccttctccaggcactcatatgtgcattttactagttggagagactcttcatcaacatttcccacaaagtatgtttcatttgagatcacctgcataacaattcatataatta

SEQ ID NO: 6473 - DNA, 889 bp, Glycine max
gccaagctttgcactgcctgcagacataatagcaacgttgattaatactaatcactgagacaaagtcttcttattcgttgacgtatttttctcttttatttttagttgcaaagttttttcaaatgcaacttctatgttcaaggggagatagcaatagttcccaaaagagtataatttgaaaccatccaagcattgagcaagaatgccatttttggcatatatggcagcatagcttttaattaagtataaacgctgacttttgcagtattggaaggtcctgttttgttagaatcaagagggaagaaaaaagggtagagttcatatcgaacatagcaagaactgtacagtactctacatcctttacgattgctgcaaaaattgggaaagttgttcactgcaatagacaaacactgagcacaggatatctcagacaggtccctagtgcactgcactaacgcataaagtgtcacaaatggggacagcacagattttcccttcccaagcccttcctctctaggcaccactgcttgtgctctaatgtgatccataagagccccaagctctttgttaaaatcttcagggtcagtcacattttcaacattgaaatagaatataccaaaagatgtatcaacctcaccaaagaaactcttgttactataccttaaaaagcagtaatcataccaaattctcccatccacttggtttggacagcgttggcggatttgtttcgttgcatcttggatgcaattggagcaatcctgggtgctaacatctcccctacattgagcgagtgcgtacactttgtcttggtctttgccatatgtggtggcaacaaaccagtggagggagtttgagggctatttcagtcaatatttatcatattggctgt

SEQ ID NO: 6474 - DNA, 838 bp, Glycine max
  misc_feature (785)..(785): n is a, c, g, or t
attgtgatgagaacataaacagacgtaaatcagaaattactactttggaatctctcattgctcagtcacgtgaagggcttaatcgttacaaagaagagagagacaagttacatggggagagaaagtatgtaacacctcttttctctctctctctctctctctctctcaaaaaagttctatgtagactttttactagatgaaagaagaaatattgttacagtgaagaatgcatacaccgaaagtgtaggatggggtgccttccttagcaaaagtagaaaggagaaacatactaaactgcaaaagtatattatttattactttccctggtcaaagaaaatatttcttatgagtttaaattgctacattataggtccctatggggcaaagagaatgaacttactgctgaaattgataagctgagagctgaagttgagaaggctgaaaagagtcttgatcatgcaattcctggtgtgagtaatccctctttctaacttctttaacatctccttttgcaaatgccattaaattgtcaagaatcctcaacatggtgtttctaggcattgaatctttcacaatgtaccagggtagtctgggcatgtttagtttagaattttattgcaacttatattctacctgatgcgaattaacacaaagtgccattatatttgtaaattggtgtcactctaaaagatggtggatgatttttgactttggccctttgagtgtttttacatttttctatgcagcatatagatgaaaggagattgcagaaacacttttgcttncagaaattgtattacactttagaatgatagaagaataaagggaattttgtttc

SEQ ID NO: 6475 - DNA, 849 bp, Glycine max
gccagcttgcatgcctgtaggagattgacacacactcacacacatatatatattctgtcttcctctattatgtgaaagcccaacatcatccagttttatgcaatttttctgcttttgtatctctttgctccattcaaggtcatggacattctcttctgttttcacatgcatacacctgtaatacatgtaatgtaacacacataagcatgatgaaatttgcatgaccaagtctaaagcaagttctagtcaatgcactagtgttatcaaattgtcatcctcattagcatcttctctgcccagaaggccaatttctacttatatttcaaattatttgtacccctaaaagagaaggtctttagtttcttctacattctttgtgaaaggaaaaatctaattatgccatatttctccattcctgttcagcgagtctatgctaattgctaaacatatatatttccaatgagtgttttttttgttgtcaagccaataagtacttggtttgtattccatggaccgtccttacctatggcctaaataaagctatttttgcaaattgtgttgctttgctactgcttgaagataaccttgaggtctttccaccaaggagagtctaaactgcagttcctatgagaaatcaaatccctccaaccaccatatctagacaatagaattgtggcccacaactgattctgattatttgccaactcccacccccatttagcaagcaaagcctcattgaatttaatcaaatcctttgatccctaaccacctttactcttaggtaggcagactatgtcccacctcacccaaggaatcttaaatggagtcttggaggctgccccataaaaa

SEQ ID NO: 6476 - DNA, 907 bp, Glycine max
  misc_feature (835)..(835): n is a, c, g, or t
  misc_feature (884)..(884): n is a, c, g, or t
atattttaagtgccacgcctaacaggcataacttctatataactcagatctcaatgaatagaacagataagtttgcatgacagaaatttaattccctttcatcttcagtacgtgtctaaaatgtgccatatattactgtaagaatgaaagtacatctatcaaagactaaaactatttacagaaaaccaatgagagggcaggagaggacatcgaacacaagtaaaaaaaatggcattaagcaacaacctttcaccaactagaatcattagttttcctttgacattaatatatataaattcgtgtgagaagatatcactacctgatccttgaacaaattgcacacaagtgaacttccctcaaattctcaaccttggacttggcttgccaaatagccaaggcaagcatcaccaatttaagaaaagattaaaccagcacctcaaccaaaaactactgccaagaagcactctgtccacttgacatggctcgagcttcagccaaagagacagccatagcgagcatcatttgctcctcaaaactctcaggaacaatgggttctggggcactttgtaggcttccatcaatgtcatcagaccgtagcaatgaagatagttcaccacgatcttctgctgtgacagagtttgtatagctagttgctgtttcagtcaacggtgtcccatggtccgtgtcccattcaccatgactcctagtcatcgccacagcttcatccagtggctcctcgttgaggttttcagcaggtggataataagccatatccctaccaagtctgttattaaaaccttctggaaccaggtagtgtgttgaatgatggcatatnttcatcagtgatgctcatagatgattctccagccatttgctggcgctcnagcagagctgcatgggcacagcg

SEQ ID NO: 6477 - DNA, 850 bp, Glycine max
aagttggtccaccatctggctaattaaccaagatcactcattctttctactcatcaaaaacttgaaaaaaccaaggctacagaaaataaaggtaaaatggaatattgatcaagttattatagtatagtactagtgatgaattatatacctctaaatctaactggtgtttaaatttgtgattaaagtggttggttgaatgtggaattgtgtgagtttctgaattgttttcaaagttgaggattgtgatgttattagaagtatatatattagtcaaaagatatactgcatgtcttttccaatgttagaagagtctaaaaaatggaatgctttttaaggtacataaaatagtgtgggtctgtgggggcctcaaattcaaacaatgtgatcgcacgtggtcgacgaaaccaattttgttggcttctaagtggtcagtggtcacgaaacatgcgttggtccttaagcaatttccaaagcaggaaaaaaggggtgtctatctgacaataacaactacaatgcatgaacatgaccatgtgtctctattgcttcagaacttgcgtttgctccaaattgactgtcatttatttcaaggtgaaaaagaaagccaactttctttcacataagcttatatattgctgctttaaatcgattcacggcaaaaattgcttgtgcataataaacataaaggaaataataacttttccgtgaaccgtaacgaaaagagtatttttaaattagttaaagaaaataaagacaattttttttggtttcctttttttacttagagaggagactaaagactaatgagagcaactatgaaaatctttctttgtgaagaacgcatctttacaaa

SEQ ID NO: 6478 - DNA, 853 bp, Glycine max
cctgcagctctcaaaaccactaaccctaatagctgaactccaaagagataaaataacagcaagtggccctcatcaattctaagtatatatataaaatcattgccgccatcacttcttctccatactcttgtctcactctaacagccaaagcatggcttctctctcttgctccgccaacgaccttgccccactcttcaacgacaccgccgccgccaactacctctgcgcccaattcgattccatttctagaaagctcgccgaaacaacctacgccgtcgacaacacctaccttctgttttcagcgtatcttgtcttcgccatgcagctcggcttcgccatgctctgcgccggctccgtcagagccaaaaacaccatgaacatcatgctcaccaacgtcctcgacgccgccgccggcggtctctcctactacctattcggctttgcattcgccttcggcggcccctccaacggcttcatcggccgccacttcttcggcctacgagattacccaatgggctcctctccctccggcgactacagcttcttcctctaccagtgggccttcgccatcgccgccgcaggaatcaccagcggctccatcgccgagagaacacagttcgtggcttaccttatctactcttctttcttaaccggtttcgtttaccccatcgtttcgcattggttctggtcctcggacggttgggccagcgcgagtcgtagcgacggaaatgttttattcgggtctggagtcatcgacttcgcgggctcaggcgttgttcacatggttggcgggatagcgggccctgtgggggggcttaattgaaggcccgagaatcggccgttcgaccgttcg

SEQ ID NO: 6479 - DNA, 841 bp, Glycine max
cgccagcttgctgcctgcaggggagatttcaatacttctcatttgtttttagcttttggtgataagttcttaaaaaggaaagctattagaaccggatggttggcatttgacattggtgtgccaaagttgagtgaatttctaaaaacacacaacttaaaacgatttcaaaatgaattcgtattctataacctactaaacactatttttcttaatcaaattatcctcaatttttccccaaaatttctagactcactaaggaatcattgacagagctctctatggttgacgatactaaagcaaaaggtcttaaatgtctgaaacatagtctaggaactaggaacatcatagttcttaactaaaaatggtgaatgattagaactagaggaaggacaaatatagtggctgcaaaaaacaaatgggttctaaaaaaaagttggacattttctattcaggttacaagctttggctctcaaaaagagatcaactaagggatggagtattaaatatggatctcatatgatccataattccaagtctgatgtgggaggacttataatggtccaacataatgacaggcctgccatttcgatggtttattctagtaggaaaaggcagtatcctagtgtagttagttagtagtggggtgagctaattcacatgaagagtatgtaaggaggggtgcacacatcaggacggggttaacagggaagaaatcagtctaggtcatttggttgggcagagagaattacctctttgaggagggggtgtgtacttacatttgtttcttattcaaaatacttcctgagatatatcctttattttggtctctatcattgggccg

SEQ ID NO: 6480 - DNA, 814 bp, Glycine max
atcttcctaactgaattcaaccctcttctcacatcctgaacatcataatagtgtcaaacatggtgatagataaaaacgataacctgtccctagaatgataataatattatagaaacatcatgacagttaaccctcaaactcaacagataaacagcagcataagatctaagtacccatgactcatactattgtggataataattttaatccccatacccttacccattggggtatctacatacccatacttacccacattataattaactacaactaaatagtcaaaaaaaaatattgattaaaaatacaactgtaattcaattaaaatactattcaaagattttttttataaaagattacaaacataattatataatattacagtaaacttccacaataacaaatttaaaaacattcaagtccaatgtggagcaggcgattatacacctccaatgcagcaatccatgaaacttgttgggtagtatcagttacaacttacaatacacatcatgcaatcacaaaggaagttggggcttgagtgcgacataaaagaaattaaaagatctactagtttcaataaatttcacttttttatttataattatatcataactctctctgtacttgtgcccaatgttatcaaacttggactggtcatcgacttggtctaggtactaggtcactgagtgagtcatggatcgacaagtcaatcactaattgacttgcatgacctaatctatactgaaaaaatttaatatttataacctgtaaacttgtatacttaaaaaatatcatgtctttattcaaacacata

SEQ ID NO: 6481 - DNA, 825 bp, Glycine max
aatcaactttactatggtaggactattttgtaacacattacaagacctgcataaaaatacataacataagtgtatactttagaatacatggaagtatccaataatatatcctttcatatcttagattatcctctagaattagttcgttgtttccttattatcacttaggattggttaccatatttcctaatcatatcatgatttgttaacttagataggattatgattagtagaaataaggattagtactcttaagttttatgaacaaatcaatacattgtaatacatctcaattaatttcaagtatcacttcattctcttttatctctcttcatccttctatatctaaaacattgtaatcttaacatatacaaaaaaaaaaaaaaaaaagtagattgcttatatttgtacacttattggcagtaaaaacacaaaaattacctagcccacactgtagcagccaccttaacagcaggaagctcatttggttggcctaaaaaacaatgacacttaaaagagcgggatttgcaagataatgtatgtgctggcctgtttatatgacgaaggtgttgaaaacccctgcattcctgtctcatgaactgcaatagaagatgtcttacaatagaatctaacaaaaagaaaatgaatgtacagtttcttaattttgaaaagacattatcaggttatctttaatactataaagtaaacattcagtcatcaatgaatccaggcacacaatgaacaacttcaacattattgcctgacaatattgcagaaacaggtagaatgctaatgaataagagacaagagcagtttaggtaaact

SEQ ID NO: 6482 - DNA, 813 bp, Glycine max
ataagttttcctgcggatttacatgccaattcattttcgcaggaaatattaaaatatttttttaaaaaaaattttggttttaaaatcattaaaaataatttcatgaaaaaaattattttaattaatcaattataaaaacctcattatttataatttaaataaactattaagtagattaaatatttcttattagatattcacttaaaaagggatctaaaaataataatttggttttagctactcatctactaataaaaaaaatgcaattaaaattacccaaatcagagataagcagacccaatgaccaaacttattgaataacacggcaataaattgctatataagatgcatgctcaaagtttttttatatattgagagtacattaaagtaaaaaataatataaaaaataagaatattaatttttttttactcacataaaaagagttcatttcattacctctcgaaatatgaaatattaaaacttttggttttatctacttattaatactaaacataattaataatcaatcatccaagaggtttccttaaaccatcatctgacgccgatctcgaaagaataagctcacaattgaaatttttaatcccatcttttttaaatcaattaaatggaggcaaaatttcttaaattaattgaaattagtaattgaattttttgctcagaagggtagtcagtaccagtcatatgttataaattactttatcaattaagatgacgaaacatgcgtgctaacctgagttttgttgcatggtggcggattgggtttattttattttaaattcaagtttttggtt

SEQ ID NO: 6483 - DNA, 840 bp, Glycine max
tgccttgcaggccgtgcctatgatggttaaaagtgaaagtggcggcaatgttgcattgcatgactctgaattgttgtctctggaaatggggtgggtagttttagttttttttcagttgcattctgaaatctctcgactctatccttttcaaatttttaatattttttttcatgttttctcatcgtgttgcagattaaatgtgcctgcacaacaacagatttcacatatagaaaggcaatcagacgggggatttcagacggtagtcatttcaaatttcacaatttgcactaaaattcttggctagtgttagtactattggtgttattggcttacatttcaggtcagaagcgttgattataagcaagaacaacaacatctaattaagtaccaaaaagaaactggtacgctcgagggtgaagcctgcctgttacaagcagtgattttctttttcttcttaatttcagtaagtataagtataggctaaagtatttcatcagttgtctgactaagacagttttttggttgttttattagaaggttcagcattgtcaccaggcttgtctcggattgcatcagctgggatcactagtgcttcttatttgcagtaagtttctcttattccgcttcattttgacctattttcccctcttcagcatgtcctgatttgatggattttccttctgaaggtcttcttctgctaaagctcaagattggctgaatactgctattggtatctcgaaacagaatttgatggaaagttgttcctctggtggaaaggtaaatgaattacaaatttatacttatactggcttttttgcatgatttacccttctgtatacg

SEQ ID NO: 6484 - DNA, 917 bp, Glycine max
ttgcatgtcctgcagataaacataaagaaacaaattgctcacacgccactagtgcctggtttagaagagcaaacgtgatgcttggtttagactggttggagtgacttagagaaattagagccaacttcaaggagttcacactcgtcagaagcctccttgaaagccttgagggtttaggtaattaacatgttttgtttttgtgtgagcgatataagtcctcccaaaggtagggcaacaaaagatcagtcaaacatggaaatgtctgaatggattaggaacggagagaatgatagataaataaatcaccaatgttatggaaaagttagtcacacaagtatgggaagactagtgagtgtaggggaagtcctatgccagcctcggaccaaccacatcactataggccaataagcaattaccaatcttgtatattcaacaatcttaaaatattttagtctcacttgacactagtatttctcttgtatcagtctagtaaaactaaaatatattcgtgctctctgatatatacttgagtttaacatttgtttattgataaatttttccttcgtttttgttccttgacatttgaaattttttgtcataagtccttgtcgtcagcttctgtcaatctggtgctgatgtatccattaagttgacaggtcagcatgtcatgcatgttaccacatatgctcgaaggatgaggggagcaatgcaaaaaacctggaattatagggagcaaatgcaaaaaccctgtaggtttttgaaagtaatttccaattcacttaactaagtctttctgtcccatttggggaccctccctggtgtggtgacctgggccactttcgtggcccccttggcccccacttggcctctatcttccgcctttgacctttgacccaatttttccattctttgtttgg

SEQ ID NO: 6485 - DNA, 893 bp, Glycine max
  misc_feature (869)..(869): n is a, c, g, or t
ttgcatgcctgcagtttcaacttcttgtggttgatcaaattcttattcgtcacatgacgttgtgtcttgtgccttgtagtctgagattacttcttcacaatacaactccaccagaaaacaataaaccaatgtctcagatacaaacatttgagagtgaagagtttggtgcttcccatgcttttctggagaagctgattaaagaaagtcttgctaagcttgaggaagaagaaccaggtattgactattttgtaagatgggaacttggagcttgctggatacaacatttgcaagaccaaaataatacagaaaaagataagaaactatctttggagaaggctaagaatgaaatgaaggttgagggtcttgggaaaccccttaaagccctaaagaattataaaaagaaatctgattctagcaatactaattctgcaactgaatattcaaagtttaatcgggaggctgaaagccctccatttccctcaattgaatcccaacttgaaactacagaagctgagaatgagcttgttctgaaaaggatattatctgaggaagcttttacccgattaaaagaatcgggaactggacttcactgcaaggtaagccttctcagtgtaatgaagtactttcaagttttataacaattgaaagtgtctgaaccaaatcatctcttgtgattaacagtctatgcatgatttgattaacttatctcgaaaatttacacagacgttgctctcccaaattggtaaggatagaatttatttggttgattgattgcacggctttgggttaatatgactctgggtgatctttattggagccttaattggggatacaggtagccgatttcggctcattggaactctcaccantgatggacgcactctaactgattt

SEQ ID NO: 6486 - DNA, 822 bp, Glycine max
ttgagctgaagctgaattctattttgaatgatcaagtaatacttctctcttgcctgaaatacttatgattctattctttgtgccatctattattgtcgatgatacattacaattacctttttttttctttctttttttcgattttcatttttggtaatttaacttgagatatttattttgaagtttataaatgaggcaaatatactcagcaagatgttggccctacatattgagaagttacgtttaattgtttatgctggtctgtcataacatgttattcataactcatattaatgatggatatgattataagtcatgtgaagctattttcttatttaaatgattcaactttcttttgacacttagtgatacttcttttttaaattgtggtccttttacaattaatgacacagatggcctaccttgatgactgggctgtacttgaaagtgatcatattgattccttatccggggctgtagaagacttggaggcgagtactcttcgtcttcctctaactggaggggcaaaggtatgtgtggtggtttctgtgtctttttggttcaatgcgtgcaaagagacactaacatcattactatgtttacacttttacaggcagatattgaacatttgaagcatgctatctattcagctgttgatggcatgcaagcaatgggatctgctatctgccctttgctgtcacaggtgtgttacttatttaggagttctactggttttgagttaactcacattaattgtcacactggcacttgctattttataggccaacacatttagtatcaaactttttttctctattgact

SEQ ID NO: 6487 - DNA, 758 bp, Glycine max
caattaaagcattactacgaaactgagcttaatatgataataagacaaagggagagggtgctattatattaaggatataaataaattgcatggcttctctctcaagtctttcttttttttttcttcgagggtggccgggtggggcaggttattcaagttgacaataaattttagccgcatcattaatatcatgttgaacaatatagtcactactttaagctatttttctaaaacttgactctagattttgtagttctttaatagtataagattgataagagtctagtaagtaaaaaaaacctgtggtcctgcaacaggaagctgatcaaggaaagttgaggcatacgtagaactttgaatgggcatgaggccatgctgctgctgctgctgatgtagtgactgaaaataaggcagttgctgttttgaatatggttccaacttactttcacctttattaaaactttcgttgacctttaactcactacctctagttgacaaggacaagaagttggaacactgtgtaatatgaatagacatcaaatcaggcgcgaggaagaggggacacagggaggtactattactataatcaaaattatccatagcttacttgcttttgaggatcatacactcccaggtgttgggggagcctgagatttttcatgataaaggccatgctgaagataccattcttggtttcacgtgaattactcgtagtagcagaataaactgttcgagtagcatgactatttccacttctc

SEQ ID NO: 6488 - DNA, 856 bp, Glycine max
tcgccagcttgctgcctgcgtgataatttcagaaataaattacatgtcagactttggagattttcaaatcaacgagaacgaaaattctgttatttagcagaatttataatttatttatttataattctgttgttgaacaaaattcagaatttatttatttataatgctgttatttagcataatttacaattttttatttataattatgctatttagcagaacttataatttatttatttataacatattttgataattctgagaatttataatttatttattgtgaattttgttattcagcataattaatcatttatattattataaaaagggtttgtctaaccatctcatctttaatgaccaatagaaattagacattacacagttattctatattctgaattctattgttaatggtatgactaccacgtttgatgtatttgatgtatgatgtctaatttctctttaacatcattttttatatcatttatgtataaaattaaaattttgtaattattaattaaaagttaacaattaaaattatattaaaatacataaatctatgtaatcaaattataaaatattaaaattagtattttttaattaattataaaaatttattctttattcactttaggtaatagttttcatttatttttaactttatagaaagatgaatttcaattttttcaatttattgaaatacataaaatagttctcattttacatttgacattacaatccgattgttgttaatatctataggagagctagttaccgaaagctaatttttacatatttcaataaaaatgtttctataaagttaaaataatgaaaattatttatataaattttt

SEQ ID NO: 6489 - DNA, 837 bp, Glycine max
atgagcatgctgcttgctgcaaagtatcagcacgagcattaagtataaagtttggatatcaacctcaaaaaatatgcaagaaaacctataatcaacatgtcttgtttgttaccttgtgaacagggaccaagctgacaatatcagatttttgaaagggaattggggaatccatatcaaaatcccttggaacaagctcaattcccacctagcacagaaagtgatgataagcaacaaactgtcaatgagagagaaggaaagagtttgctgatttaacataagagtcttatgaaccacttcatatgagaagatgaatccagttatgttgataaggtcacctaggtagcatatgagtatgtaaaattctcaagcaccatatagctacttgagcctacttcaacttcacagagaaggttaaactgaaacccatacttccatggatgtgaacagtgaaaatattcaagcagaaaacccagttcataaaatttagtcaagtaaattcctagaaaataggaattagaaaatatacaaatgcatgactccattaccttgtgacacaagccacgtaaaattgcaaatttcctcacatccttgtaattcaacttgttaggatcccaatcaaatcgcttcttcaaaaacaactctagccatttccacaccaatgggtgaacttcacgtgatttatctaattctctattttcaggaacaccaagcagcaaattcaatgcaccagcaattgatgaagccattttctccttgtcaacagcagaaattactgcccgcaggatgtgcttaaaagctcgaactatcatctcatgaatacaaagtgattggacatgt

SEQ ID NO: 6490 - DNA, 852 bp, Glycine max
actgcactgggttgggcttgatatttatttcttcttgatgggattttattatttatttgtatttgtaaagagtcaaatcaaaagcagaaaaaaaggcaagaccctttttctctctctatcgtgttggatcacgagtggagttccagagctcacacccatgccaaaacttgcgtttctttctgagctgctattatcatattctatttgtgggtccatttctattcacctccgttggctcaaaagggcattcatttcttgctgaattagaattaatcattttgaacttttagtttgatgaatctcgtgattttaaaatttgatgattttaattcattcgtcatatttttttttgttgattattactttataaacgttgattagttaatcactaatgtgatacacttatattttgttattaataattaactgtgattaataaaattattaagttggataaaaatcaaaccttcaacactcctccagtgtcatcaacaaaccttgacgttcttggatgtttcacgtggatttgtgatgaggtgttgatcggattcttcactctaggacaaaaaagagttcaagcaaatctgggttgggagacacgtagatctgggacaagagggttcatgcgtttactgtaagacatttatttagtttgagctatgcacatgtatgacgttaatacatgaaatactgcatttttttttcaaattaaaattcataataatgatgattttttattggttgaaaatatttttttatatcaacagtacataatcattaaattaaaaaaaaacttgtcacatttgcttttcaaataaaaattgttttttttttttgcactattccaatttt

SEQ ID NO: 6491 - DNA, 890 bp, Glycine max
agcaagaaggttacgcaatttcaccctatttgttcttgcagaaagacccttgccatttgacaactgagataaattattttcagaatctatgcacttgttctggacacatggaagacccctaacacgtgctttatatgcaggactggcacttcgggaccatttatgccattcccagccatcaatagaagtcctggcacatccatcagatctaggacacaaattcagtggcttggatttagcagacttcctacttgccacagtaacttgtttactggctcccagataagcaccaccatttgaaattttcaaaacctttgtaggatgtgaagatgctgtaccatccatttgatgtttcctttttgattttgatactttcattgttgctgttaacagaaaaaggcaacccataaagtatattcattagcttattatattacatatattatactttattcagtttatcattactattattattattattatttaattgtaaaacatagcatatgcaaactagcaaagacatattctagcttaataacttaaaaaataactcttaagatcatcaaatgcatgagttcagctaaaatttattataatagaataatattaaatttataataaatattttactattaaaattattatatattaaaatttataataaatactcagctattaaatctcttataaattaatatattaattaaatattcgtagttgaaaaacataaagattttatgataaaaagatattaaacaataactgaaataaaagcatatcatatcaggttattacttctttatttgccaaattcattaattttaccttaaggtttaaattgagtgcccgggccaaagtcgaaatagcctccttgaactaaaaaacca

SEQ ID NO: 6492 - DNA, 851 bp, Glycine max
tttcttatcagcaatgacttgttgtagctcagcgacctcctgctccaactgctcaacctgcatgatcacaaacattttgtaaaccacacaagccaaaagaccagaagaaaaatgagttggagagaaaaagaaatcataaacacaattgtacatggatactgaacaagctttcctagtatttatgccttttatggggttcaataaaagtactcttagctgattgaatgattaaatgatatttaaaacaagcttacttatattatttatgctaaaacatgcctcaggaatcggtttagcataatgatgtcttcaagatataacaaaaaaaatggtggtggttgttggtgggcaaggatctttgaagagtagaaaatgaaggaatagaaggaaagtgtgcacaatgtcttcaaggcgccgataaatactttctttcaggatacattaaagacccttgagtatgtcttgcattttcaaaactcaagtcctgacaacagtggtatttacagaatgatacttttgcttccacctcttgtgcaccaaaggccaagaaaatgaatttgtgaatgaatagagagaatgcacagtggccagtggggaaaaatcttagaaaagatgtgaatttggagactgctcctatttatagaaaatatgtgtctattcatgaaaaattacatctattcaatttatgtcatttcatgaaaagtcatacatttttcaagtaatgtctattcaataaaaagtcacaccttttcacttttatgtcttctacgaagagtcatttatttctaataagtgtctatgaaaagacagattaaatgaaataataccaaactctttaatattttaacata

SEQ ID NO: 6493 - DNA, 835 bp, Glycine max
gatgtaattgattagtggatgatatataattggatagtaataacaagaaaaaaatacagggattggagaaaagtataaatgtaatcattactacattattctattcatatattttagttttattcccttttacttgttataattaagcaacaagtgcgtcggcaatcatcgtaagccttcaaaagcataaacgtttggccaagcttgttttggggactgaagagtgaagagtgaagagtgaagaagtaggtatctattgattcttttatgaaatctttccttattatttatataaaagtaataacaaataataaacatcaatcctaaaatatttggaaaaaaaagtgttctataaaattacacattacacactttatagattttaaaaaattgaattgtaggtcgacccttttaactcgcaggtctaactaatttaatccaatatctaaatgtactaaaccaaagaaagcttacatttaaacagtataagtttttcttgatcctaatctacgcgaatgaaggtttatatatgcccagcttttatttagaaatgagaaatactcaacgtacatacatttgtttcttcttctagcctacttttacctcatttgtctttctctcattctcttttcatataatttatttgtaacatctatcatttcatttttaatttttctctctttatctttctcttattttcactcatacatccaaaaaatggagtttaatgtttattattcgctttagatatagtataatgaaagcccaaagttttagactccaagcacatttgcctgtgacttgtgtaaggtccgtaacgtggctgctcgagcac

SEQ ID NO: 6494 - DNA, 833 bp, Glycine max
attgggtatgaggaaataaacagttttcattctattttttccttgtatataatacttttccttttttattggctatgttgcttagtgcctttgcaaatgtaattgagatttcaaagtggaaaatatttatcgttttgattcccatggatgcttattcccttgatttgcatctgaagaatgttttggatcttttacagactattttgaagttacttaaattttttatctggattttaaattgatcatataatagttaaagaaattcctgtgggtttttaggcattttttttctttcaaagtgcaaatgttttgtaaaatatccttttacttaatcactaatttatccaaaattttaaatgattagatttatagtaaaaactaacgtaccccagtgcccgaaggctcctcactgtgcgaagttatgggggagtgtcattgtatgcagccttacccttgcatatgcaaagaggctatttccggattcgaactcatgaccaatcggtcaccaaggcacaaatttaccgttgtgccagggctctccctcaaatgattagaattataatctttatatttaataataaagttgtttggggctttaaaaactgttataggctgctagcatcaaataggttaggagccaggagagctttgtccctttaatgagtcccacccagcttgactgaaatgagtcacggtacaaggtggcttctggatacggaaggtcttgaactaaagagagaagaggtaggaattatggataaattgagtatcccaagggtaggattttaacagtgtatcttacatttgaagtggtgaataaaatttgatacatt

SEQ ID NO: 6495 - DNA, 839 bp, Glycine max
atgctaaaatggataaagaggatgtcaagaataatggtattcgttaaattttatgtttcactttcctttttgcatatacatctttatacatctatatctatgtagatatagtcatatggatacagatatgaacctttttcttcataatcactaggattgagttcctattgtcttaaatattcagataataaattccacatgtaagaattgtttcaggaagtaaatttagaacattttgggtaacagaggctttaagttttcaggtttttcttttttgtagatttaatatcctgctgaaaaggttgctcacttttctgcttattacatacttcctgattcttgaattaggattgtaatcttacacacaatatatatccacgataacaaccaataatttgtatgtaataagaggggactatgacagtttgttaagtatacagatttttcagattaaggaagccttttgtattgtttggcatcattctttcttgcccatgctattccttttctaaagtatcacttatcattacttgttgcttttaacacaattattggtgcattttatttgtttacaatgtgcttctactataacttcaacttcaacttcaatatttgtgattgcaatgatacttaatgcatttaggttatcaatggaagccagatatgtacatcctaatctacctgagtttttatctatttaaaccctactataacaatctcccttgttagttagatcttttgtatagagaattagagactatatttgctttcatttgataaataatattaccattcattagacactattattgggcttgagacctgaccaaaccctgccc

SEQ ID NO: 6496 - DNA, 860 bp, Glycine max
acaatagaaataagatctgaaacaaaatcaatgcccatacctattactgagatctacaccttcggtatttccactctcctttaaattcccgttctcagagtcatcaatgcaagctggatcaacttctttcagtggcagctgctggtcagatgcaatacctaaagaattggtagacgtgaagctgccactgtagcctgccatgaaaagcaacagtaatttaaactgtctaaccctgttcgctagaattataccataggataccatcaattcactaacctgtaatatctcctttaatgctatcaggagaaagacctgcatcgttaatatgactatgaagttgatggggcaaggccaaaggaataccaacagaaagactgcgttggtgatggtgaatgggattattcttgaagtctggaagctgtagattcttcagccttctttcttgaagttcacggacttgctgcaattcagcctgctcctcaatttttcttctcaataagacatcatgtggattatacaacatccttgcccctgcataaaataaagttggtgagaataaaatgaaatgaacatgagagactcctttgcaagtatcagcatatacatacactgttctagaaagttgggtggattcaggaaacggcacatgcatagcaactcttttaaagtacatccctctctaaaaaccaagtaaaataaaaacgtctcttagaacttggactaaggacctaacttacaaaatcagcttgtaaggtgagggttgcccaagccttataagaactgcattggtcatatctctagttgatgcaggatttcaacaacccctctcattacacctaggactgaacatctgaagcatg

SEQ ID NO: 6497 - DNA, 833 bp, Glycine max
tcaaaatgtttttcgccaactggttgatttgataggaattacatccattatggaggtaaacttttaccatttcagtagttattatgacaattctgagatcttgctgatgtatcaaaatggattctgagataagttctttgacaggttttggttcgattggtaggcgctgatgaccacatgtatcacaattttatagatgtgatgcaatggttggctgagagcaacctgcttgagatgattgttgataaattgagtccatctgtaagtgaagcatctattcaggtttatgttcctttagcctgcattttcctgtttgctaagtgatgcttatgcacttagcttcatgccttccagacagacatgttaaatgagattgaatgtagctacattctttgagttggaaattttctattctacaagcttgacattggccatgctaatgattgctagtggtgttgtgtttgccccccaaaatttgttttctgggacataaaagatgtaattgattaaaaagctccatttagttgcaaattatcaccttgcattttgttgcaaattatctgacaactttttgttgcttattatctgacacttttatgtttaaatttataggctctttatcaccttgcattttgttgcaaatcatctgacaactttttctcccctatttaaaccagagtcctcctgaagttcatgccaacgcggctgaaacattgtgcacaataactcgaaatccctcatcttctctagcaattaaactttcaagcccaagggtctgattctatggtttttggggttcttctctaatatgtaactctgaaatatttgttata

SEQ ID NO: 6498 - DNA, 867 bp, Glycine max
aaatacatgagcccaaacttagcatgttgctgaaacagaactaaaagtactattggtacttagattatgcaccatagttgaaaattagggttggttaacttctgtttccattttttgttttcacttttaattacaaaactatcagcttgttttcaacttgtttcctgtattcaaagatttgtaaaggaaacaggaaaaaaaataacaaataaaagttgtttttcactacttccagtgtaaatatttgaaaataagaaacaaattgaaaacaaggatacaattttgtaattaaaagaaaacaaaaaaccttttctgaaaataaatgggcccttacttttctatacatatgcaacatattaccattcgtgaatttgcttatttcatatgttaatgtaataagtgaaactgctaccatctattcattggcaaataaaaaaatttgcaaccataagttaattaatttatcaaacaactttttttaattaaaaattacatcatcaaaatattctcatcattctatcactctcttccaccctttgctagcagtctgacagagctacataccttcggcttatttgcatagtacatactatatataggcattcatttgcactaggagaagtcagcttacatagatcaaaaacgccattcggctcaattaaagaccaaatcttcaaagatactattcaccattagattcctcttaacaaattcatccaatgcccctcttggtctctccccccttttaacatgactaaaaaccatgtaatcaactctccacatcagagcttctagtggccttctttgttgcgtgtctaaaacactggtaccatttttggcattttttttcttaattatgctacacca

SEQ ID NO: 6499 - DNA, 849 bp, Glycine max
cccatatcacaacattagtcacatttaatttcaagggaaaggaaaacatagtgactcaagggtctctctttcagggggctatggtaacctttacgagaagcatccattaattctaactctgcaaatgtgcatttttagcatatatgagaggacaacaacaaagagtgaatttaataattttccatgtaccttatcttgctgagtaacagagtcccaatcatcaacaagttgtttctttaatgttgcaggaatttgaatcttgacaagcttttccacagtcccactgcccttctaataattaaaaaaccacacttagcagaatattttcaattaaaagagtagtagcaaaaatgagaaattccaatcaaatcaaatctcaaacaaactcggaggtattttttcatttttcatttataaataatatttaatatgccattttgactttatcatatgaaatatataaaatgaaaacaaggaagcaaaagcaattaattcattatatgaagagaatttcgatgcaaatgataaatctttctggattttagaataaaagaacatgccaaacctcgactcccgcatcatgctttcttttcttccctttcgacactgcacagagattgatgtgttaaacttattagtacatacaaattgtaatatggcaagcaaatataacattttaaataagaattttaagaggtccaacttgttaattactgcacttaaatgcagggattaaggaaaatgaaaagcatgagggtgcttattgtgttgggctttatatataaaaaaaaacattggaatagtgtgggccaggcctaaaaaatgagatgaccaaaggctattttagaa

SEQ ID NO: 6500 - DNA, 892 bp, Glycine max
gattgcaaaataaatcattggtatggagacaaacaagacttgccaagtaacaacagctaaaacggttagattagcatagcaattcatagtggctcccacagcaaaaacaaagccgaatgggacatcaaggtctacaatgctgagatctgaggagacctgaacaaggaaataacagtcaaaacataaaggcttctgtttatcgcattgcactgtaaggggaaagaaaaaactgtttaatatgcttaccctactaagtatccttcctaaaggagtggagtcataaaatgacatgggggcacgaaaaagggagttcagtaactgtgaaaacaaagactttgatgattgaaggcccaaagcaactacaaaaagacttctcatcaacaagaatagtgttgaaataagtccaatcaacaagtaaacaagaatcaattgcaaagtgctgacttgaggattgtcaacactagcggccatccatgagttttgtaatatttggccaaccacaaatgttaggtgagaaagagcagccacagagaagtatatatatcctttgttctgattcagatactgtatatacggtttgaacccttggtctcctttctctctctcttctcgcttaatcaattgatcaccttttgatgcttcataatgctgctccgtagatgtttttctaatttctctagcactatttgattgtttctgcggagaagtaacttccacaagtcggtcagaaccagcagtctctctgtgggcattcacaaggtcctgaaattcttggcttgagctcaacaaatggtaatacggagcagcttctatgatttccccatctgacatcaaactgtatcaaagaaataattacagccatgctaatttacagctggtgctttaaaaagaa

SEQ ID NO: 6501 - DNA, 840 bp, Glycine max
aaaggacagaggctgtcacttatatctatttgccttctccgtagattagacttagtcggcaatcgatctcgaattaacctccacgcaaagattgaagctttagtcggtatcttcagcttccataagtccttgaatatatcatccatgcttcccacatctgaattcccttgcagcaatctataggcactcctagaagaataataaccattggactcatgtttccatgtccagctgtctgcttcgtgttgctgtagtgtgatgtgagatatgtcttctaagaaaccaacagccgatgctacctcgttgtcaaataggggccttctccacgaaagattccattcccaggctgaatgtgtgaaggtccccatttgcagaattaacttttgttgctggcgggatatctgatataacctgagatatttcagcattagtggttgcccactgccagtccagcagtcctcccataaacggatttttgtccccacaccccaccctccatattgttccctcttgaagtatattattgaactgttggtcatgggtcactgccaacaaatcctgtcaccacactgactcgttgctgactcttttagcatccaccaatgatctccatccaccatacttagaagcaagtattctggcccacagctccttgtgttgatgaaacaaatcccatctccactttccaagaagagctttgttgaaggtccttatgtcttttatgcccaggccccaattttgttttgggaggcaaacaggtttcccatttaacccaagctatttttttttgcttccaggagctcactttggccacattcaccctgacatgtcctacttccg

SEQ ID NO: 6502 - DNA, 834 bp, Glycine max
ccgatggacgggcagatatgaagcgcatctatgggataacagctgtaggcgagagggtcaggccaggaaagggcgtcaaggttctctctctctctctctctctctctctctctctctctctctctctctatatatatatatatatatatatatatatatattgttttcttttagatttgaactttgaaaataagaaaatggtaagagtaaatgtaaatgagtagatacaaaaggaaataaagagggtcactgtaatgctgaaaagagggttgcatgcgtttgaaagtttacttaattaaatgcttattattaaaattgattcacggtttcttcaatttggcggggcattgatatggtatgtgtacatgtactaatttaataattaatggaactaacagtacttcttgcatgttcaatattttcacactttggatgatttaagaaagaaattggaaactttgacgagtaataaagaaagtgataatgtttttaaagttatttaattttagagaaatatataataaagtgaaaaattaagatttttctgaagacatttatgtccttattcataatattttcgttatgctacttctaattttcaaatcaaaaggaagaaattaaaaattggcttttgttttatagtaatttttttctttctttacaaattttgttgtttcatgcaaagcatgagatttattttgaccgatgtgccggcgttttgtcgccgtgattgtgagtggggtctgcaatttccttcagttgatttgttccaatgtgccgccattttttatgtttaataatatcttctcaagttccaaaccaaataaagaaaaa

SEQ ID NO: 6503 - DNA, 859 bp, Glycine max
aactttacctgtctggattttatattcaccaagttccacaaaattttatttaatagttcatatgagaattttatatgctaagcattttctttgccgtactaaaaaatcattttacgactttatattctcattcttttaactttcatttcatttttgtcctaaactagcataaattagatttcagtccggtatattagtcgtgtacagatactttgctttacaacaggttttaatataaataaataataggatccgcaaagtaattgattgaaattaacagatgaactcaacaattcaaattgaatcatattcgttcagttaattggtttgttttactttaaatctgaatcagattaaccataataaattcaatatcagatttgtcttttttttttctttaatctgaaccaacccgatgaattgataattttttaagtttaaacggatacattttagattttattacttaagtttatcttcttcattaatcttattaccttatccagtgttaccaagtgacttaactactactaattattatgtaatttgttttatcatatttcttagtacggaaaataatgagacttgtaaagcgataacaataagaaaataagtattaaatataatacatatttaatcattaaaaaaagaaatatttttacttttcattaatataaaattaaatatttatataaaataaaaaaaattaggacaaaattatatataattacttattttttatatcataacctaataatccaaatcaccaacccaattttaatggatggggtttttttttttttttgaattgactataaagatttcaaaattcaatttaatcaaccaattgaattgaatt

SEQ ID NO: 6504 - DNA, 847 bp, Glycine max
taggcttcacgaccacgaagacggagataattccgcaattcctcgtaatctgaacatgtgttccccagcaaatcaggggatagatcattcaacaagtagcaatatctgaagagaaaatgaaatatcttccatcaacattattttagatccaagattaggcaaaaaaatgcattatcaagcaagcaaatagttaatattgtcattcaatcacaaactgaaatgtaaagttgtgcagggtttggtgtttaaaaataaaaaagaaaaaccgaaccactttacacaaacagttcgcactaaactgcttgaaccactctatgaaaacagtttggttcaaaccgaattgttttaataaagtggttcaatttggttttgaaacgactagggtcgattgtttttacacacccatgctgtcatgtatggtaagtttcttaactttcataataactactttaaaaatcatatttatcatgaatttttgttggttgataatgtaaaacttttagactgacagtgcatagatagaaattaaactcttataaagtacccaaacacaggaagagaaaacaatacacacattgacagtgtaatgttttttttacactattatccaataaaaaatgctcatttatgacgggtttgttaacttttataataactatctttaatcatattaaagatgatttatgattagctgttagtgtaataatttttacactaacaagacgcgcctattaaacttgtaaagaaaacctcatcataaataatgcataagaacacaatccaagagatgcttcttattttgacttctcagtttggtctttaggccctcattttaaaataggagtag

SEQ ID NO: 6505 - DNA, 833 bp, Glycine max
taggcttcacgaccacgaagacggagataattccgcaattcctcataatctgaacacgtgttccccagcaaatcaggggatagagtattcaacaagtagcaatatctgaagagaaaatgaaatatcttccatcagcataattttagatccaagattgggcgaaaaaatgcattatcatgtaagcaaatagttaatattgtcgtttaatttaaacttacatgtaaagttgtgcagggcttgatatttaaaaataaaaaaaaacgaaccacattacaaaaacagagttcagtttgcaccaaacagcttgaaccactttatgaaaacaatttggttcaaacccaattgttttcataaagtggctccatttggttttgaactcgatttagtgtttttacacacccctattgtcatgtatggtaagtttgttatttttataataactactttaaaaatcatatatatcatgatttttaattggttgataatgtaaaactaagactgacagtgcatagatagaaattaaactcttattaagtgcccaaataaaagaagagaaaataatacacgcattgacagtgtaatgcttttttacactattattatccaatcataaacgctcatttatgatttaaactcgtaaagaaaaccccattataaataatgcacaagaacacaacagtcctttagaaacccaaaaacaaatatccaagagaggattacttattttgacttttcagtttggtctttaggccaacatttaaaaaaattaggaatagattggtttgagaaaattttttcattttattttttattttcaagaaaatccaccagac

SEQ ID NO: 6506 - DNA, 857 bp, Glycine max
gcccgctgcaaaattagcagtggcacctggcaaaagattgtcactagagtttccacctcttaacatgcttttgtatagatcctgttgaaaaaaatagttcatctatcaatatcaagacagcattaactgtaacattacatattaagcttcaattataatctttcatcagttgtatgagtgaatgatgacaggcagaagaaagaaaagaaatacacattgtaatatgccaacacggaaataaacttttttttaaaaaaatattgtgccttgttccattgaatgcatagatggtgaagttgttctgtcagtcattctctattcaatacctttgtctgaaccacacaaaacgtggttgcaaaacagcaaaaagacataaaaggatcacatggagaaaggagcaaaactaacaaagatacactaccaagattgttacaactgttctttggaaatttaattactaaccttgattttaggttgtaatagctgggttggtatttttagcacttaattgcactccatgtattcatctcaaccctaggttaggacacgaaaaacacaattgtaaagcccacattttcattcatacgttaataatgggactggccatcttctaggcaaaaaaaacacaagatacatcttttgccacattcacatcacagtagtcacattcttactaatgcattgctttaaatgagaatctatgcttaaatcctttgttttatatttctgataaaaacattgctgtcatttgaaacctctataaatgcattaattaggaagctacatcattgtcttcaacaagagcagaaaatgcttatttggttagaaaattctgatatttctcagtcaaaaaaatt

SEQ ID NO: 6507 - DNA, 789 bp, Glycine max
ctggttttagtgactagtagattatacccagaatcctatggttgtatgaaagaaagtggaaggggctaggcatcttagatatcgaattaaacagcaccaagcttaataatgtctaataactattaattttaatctattgcctgggttgtaacttgtaagttgatatcatgtggaaaatatcataatggtataatgactagctgtaaggctattagttcaaacaattacttgcaaatggtgtaagagagcaagagcaacttcatacacagttacacatttaaccctccctggaccttttcacacggctatcattggcaccccttctcttgttcttcattcaccgggcatattcactctccacgagtactttaaacacgcatggcctaaagaagctcaatctcattaactcctccacaagaggaatcctaacaagtccacaccaagcattccatttggaggtctctattttccttggacgtgtggcattagctcatagaagctgtcatgcccacaccatagtttgggagctttggacctatttgggtaaaacttgtttagaaacacttttaagaaaagaaaagaataagatttatgatatcttagaagtgcccctccataggggagcctactttgttttttctctctatcgcctactaaaggctcgaccatgtctcctaggggagcattcacggtaacttagtatccagctagacccttgtcaacctgtctgttgtctaggtgaagatttagtgcatatttggtttaacttattttgaaggaaagattgta

SEQ ID NO: 6508 - DNA, 838 bp, Glycine max
atacaaatttcaagacttttgaagctgcatatccttatgttgttcggaaacttctcacagagaactcagctgcaacaaggaatatattgcattcggtattataagaccttgaacaatgagttttgcgccaatagtatgaagagctgtaacataaaacatctcatcatgtgtttgttgttatttgctgatgttacagcatagagaatatattctgagcatctttctttgagaaaaaatgagaagaaatttaataatatgtttttatatattaatcctgttcaaactttagccacacatttttttaacatgtcttgtcaaatcaatcatcatagttttgcatatttcatctatgtgaactactagacatgatctctatggtactgatggctgttatgaacgtgtactccatacagtttcttcttaatatatcctagacattattcatttttttctctctaaactctgttttctcctgttaaggtgcttctaaaccaaaggaaggagttccagtggcaaagactttccctgttcttgagggtaggggcaaccaggtatgtcacggtgacatcccagggagtatgctctctgggaagtagctctgttttttctaatatatattttatatttttttaatgcttagtttctgacctaatatttatcttttttctacgatctatctactttgtattttcagtttcatctacaaactatgtagtaaacagcaaggcctctttgattgaaagattaaaatgaaaatggccaattgctatctaattcaaataaacacacagtggcatgcacttgaagctctttttgtggtgcctcttaaaaattacaa

SEQ ID NO: 6509 - DNA, 833 bp, Glycine max
gcagtaatcaaacactccaactaataatgcaagactcagtataatgaatattttatttgatacaattaaaagttattgacaatgaacccactagaagcttgggcaacctggtaagctgtgtacaatgcaatgacaataaactggaactaatttaatccatatacacacacacaaaaagaaaatcaaagccagcctacaagagaatttggtaacctcgttcccacaaaatcagcaatttttcatttacaaccacgtatagcaaataaactaaccagatatctattgctaggcatggaggagcactagaacataacaaacaaccaatatagacaaataagataggaatggtgacagaatattcaagtacataaaagaagcaagatagacagcttatgggaactcacagcagtcatgagaagtcttctgatagcaacaccatctttggatggtaaaagcctcaaaaccaaatatgcaatatcaattgtatcagtggccttacttgttgaatgatcaagggaagtctcactatttgatgctactagtcgcaaggctttcctggcaagatatcaaaagtatgagacactacatccacaacagtaaaaaaacaacaatttattaagtaaatagtgtattaactaaaacaggccagcctaaggcatattgtctgttgcacgaagatcagtttgagtgcatgacaaaagtgaagtagacagtttttaggcactaggtttacagatttacctgtagaaggtcagtatttgtagaaaaggggagcttttcacgataaataatatatgtataaaatggcactgtaaatttttttgtgtatttag

SEQ ID NO: 6510 - DNA, 821 bp, Glycine max
ttgcatgcctgcagatgtcttattttaaagttaatattttaaattctttgctcactgacttggtggaatttgttgtgactagtaatttgcttcaatttcctattttcatttgtagtgtgactcttaaaaggtatcttgattagatgcggatagattatcacaacagcttgatcatttgcagaatatcggtccgaatgttttttattttgttggctggcttaggaatctagaggcaaacccaataagtttgcacgtggaaggaaaatggaagccttgccatttcaccgcaatgtgaaatgccgtgtttactaaaatggtccgcgggtactaatattgcatgataatgttgcaatattttcacccacttcgaaatggtttggttcggaaggtggaaccaagtttctttgaaaaagttaaaatgtttttgcatgttttctaatcccccctgttttattataaatattaatctagttgagatgtttggcaacagtcagtaaatttgagaggaacttttggaattttttttttgacagaaacttgtccttttttttttgtattctggattcacttaatacctggtttgagcattaactaacaagggatacttaagtaaataagtaccaacttgggctgaagttcatgacatgtatagtttgttacacgaaaaatcccgcttgcggtgcacatcaaatcctataaatcctattagcgtgttggctgttgcttcctgcattcctacccatagcttcctggcattttccattgcattatgaaaagccaagtctgaaatgcaaatagtgcaggaagttttaccctagctt

SEQ ID NO: 6511 - DNA, 859 bp, Glycine max
ttttttggttggcaaaactgtttttttttttctcttggattattttgtagacgttgtcaacttgttcactctctagtctcccctgaagcattatgcttgaaggagaattgtattactgtgtataaaacaatgtgggggtcatcgctagcagcattagtatagaatacatggattgatggaaaagaatacaatggaacagaacatggtgaaatgaaatgattataagttttattatttgaattgttaaggagaggagggaatgcatttcattccattccacaataatcatctttttcttcccgtgtaatttgagggctatgggatgaaaccaatgtttttttttctttctgatctatcataaaaagaggagtgccaacaacatactctcaatcacactccttctaacacattttctattattagttaaaatttattagaaattacaaaatcatcatagaatctcattaagtaagatgtgagacctatcgaattttataatttttaataaattccagccaataataacaaaggattcattcaaaagaatttgttagagtgtgttgctaacatctatcatcctaaaactatcctaataattttgttttattccattttactcctctctattccataacattccccactctaaatatccaaacatagcttttagttcttttgttaaactaccttgatttgttgttattcttctttgctggtaattcctcggatcatgaattattaaattggtctctgacctcttgttttctctgtgtcaacatggggaaactatacgattatatttgtaggtctgggctgcccggtttttctgctgctatattgaagaagcgcatctctttag

SEQ ID NO: 6512 - DNA, 897 bp, Glycine max
  misc_feature (887)..(887): n is a, c, g, or t
ttcgccagcttgatgcctgcagatgctttcaggttagaatcagtaactgtttcttcactatttatacacaaaaatgttttgagatattatcttttatgtcatttacccgagagttcaaaggtggtgatttcttaaatcttaccattcttctttctgatacatttacagaaaatgaatgggcatttgacttgctctactgtgcggcattcgtggttatggacaaactgtggctggagagaaatgctacatacatggaatttaatgtaagcatccattgcgtacttgctgagtaaattttgttgtgctttattaaggtgcttcttttaaagggattgagggtgagtttgttaaacttaaaaaaagtaatttcaaaataaatgctattcacaagaaacagataagatttgcttattaaaaaaacagaaaattgctaattttaagttaaaacagtttatacaaacacatcagaaaaccatgaagctacttattttgtttgaaaaaacacttatttaaaaaaataaacttaaacaaactcgcccggaatttgaataaaatgttgttttctgttacaggatgtcttgaaatccacgcgagttcagctagagaaagagttgttgatggatgatgttctacggattgaagacatgccttcttacagtcttctttgttgacaagtggctcaaaaaccctctcttccaacgaagcatagtttgtgtaatgtgtacatcctcgctcacttgcttataggtttaactttaattaatgtccattaactaggtctagcatatcttcttaatttatccccctttttattccttacatgatatgatagatctaaataaaatgaactcgactccttgactaatgactagtgctaaagaaaattncacattgctg

SEQ ID NO: 6513 - DNA, 869 bp, Glycine max
aacattacagataaattgaaaccacagaggggatcccaaaaaaaaaacaagagaaaatccattaagattcaaacctcaatagaaaacaaaccacgagtattagcactttaaagaaattaactgttataccttctttttggtcttgctctcttcctcatcatcatcgtcatcatcatcatcgtcatcgtcctcttcatcttcatcatcgtcctcttcaatatcttcatcatcctcatcgtcctccagatctccaaactcgtccccctgaatggcctccccagtaaaccatgatacagcatggggaataatcttgtctcttattgtggacctaaacaagtatgacaattcattaagattcaaacatcaagattacaaaataccaaagatgcatggtttgcaacaaaagtcaacaattacacttaagcaggaaatgtataacatgttggaaacttaatacatgccacaactaacacaggtaaatggcaattaagctcaccctatgtcatagtcttgttccatctgattctgaagttcctcagcctgttaaaaaaattaatcaaagctaaaaaaaagtagttctgcaaataacaacagtataaaaatcacaaattacttatttttatttctactctgttatctaaaatcaatatcaataccacatcttcatcaatgtcttcatcatcttcaggaacttgcgggggggttgaagaaattgaagaagctttcacaattttcagttttggtaattgggttagcattcttcgaacccttcttaggttttttcttaagaatcttctgtgtcagacatttttcctgggtgccattgaattcagtccctgaagaaataaagaatttaaaatcagcaaaca

SEQ ID NO: 6514 - DNA, 2682 bp, Glycine max
ccagacttgccatgccttgttgggtcgtgcctgtatattacgcattatcatgtaagcaatcattgcctagaaagtgctactgacatgagaacatgctgtactatgaagtcaaggcaatttttcttacctgtccaactatttgtccaccaaataccttcccaaattttggagcatctggaggagtgattcctcggaagatatctaccttccaaagagaaggaacagaatgatataagggtgaactatacaaaatatagcaggatactacttaacatcgttttaattgtgatctgcaacataaaggtttttcaactgactgcaactgcatcacgattgcaatttcggcagtgtcaatgattgcgatgaaaccacaggcaatttacttaatatcaaagataaaccaaggcaaccatatctgactagtttccttttctatctattatttatataatatatatgggtacctctataggttccaaatgcaatatatgctccacaggtgagcatgtatcaggagatatttctgcactccatatagactttggctgcagaagatcaagttcaaagggttaacctactaagatcaactgatgacaattatgatggtgttattgtggaactggatcagcctatggattctactacgttcatctcgatccttagagcttcagtttctcattggaagaagctggtaggtaatctttctaattagttgcttgatgtaattaatatatgatatctgatttgattcattgtcggaaacatactggtcaaatattaataaaatgtaaggatttaaaactaggcatgattaggaactcatgttaaagaatacaagcagacaaatcaggtatagatgatttccattctactagccatatatccttctttaagtttctttgcatggcaataagtaacatattctcttcatcaatgcatccagacacatacatggagttttacttttaagtggctttagtttcttcctttgtcactaacctgccattcagtatatagatcatttttatatattctcattaagtttggtaggtattgtcgaaaatgtattcaataaaaaatgtcagctgacccttataatcctagattagcaattttgatctagtggaacaattttcattttgaacttgcattaagctttttgatttaataatctcagtttcctgcctattttattttgcaaaacaagctaaaaagcttgtcatttatatacaacaaaactggagcttttttatctgtaatgcagtctgtgtgtagtgagaatgagaatctagaatctatcactatctttgtttgtttgagttaatgaatcaacattgtcatgcagggcaagaagggtgtttggataaaattacctattcatttagtcaatctggttgaagctttagtgaaggtaactaactttattgcttaccttaatgatagtggttatgcttgaaatgtttggttaatgaaaattggagtgctgttaatgcttttaggtatcaattttatttattaacttatttccatgacacttctatgcaggagggtttttggtatcatcatgcagaaccaaaatatttaatgcttgtatattggattcctgaaagtccaagcactattcctgcaaatgccacacacagggtgggcgttggttcatttgtcatgaatgaaaaacaagaggttttcccccaccatcaatcacaatatagtgcaacttcatagttcacaatcaggcttatacttaattggaaggaatctcttattgtttgagggctatatctttgacaaatactgttatgcctgcctgtcctgtatattgataaaatgataacatcatggattaagatgaaaaagaacttttcaatcatttgagacagctgaagggaaaaagcaccttgcttctcatttattcataggaaaaaaagaagtgatgaatggactgtatctttattgtttattttagttctctctctttattttcccatccattgctcctgcttagttttattcttgtcaatttctgtctggtaggtccgttatcagaattttcattggaaaagggtatcatgtctctcactaatagaaattcttcagaatttagttctattggcaattaacatctcattttctacttattcaatggtttaggtcctagttgttcaagagaatagtggactatttcaaggaactggagtctggaaattccctactggagttgttgatcaggtagatttgttggatatctttctcattacggtataaaaatctatactgtgtacatataatctactcattcaacctattcagggagaagatatttgtgtagcagcagtaagagaggtcaaagaagaaacaggggtaagtaacctcattgctgtactaattaaatgtggaccattgttctaggcctaattattctgggttctctcaattttcaggttgattcagaatttgtggaagtattatcattcaggtggcaatgtttatgccaatttgtatacttgatgggaagttccaatgattgattgtggagacttcaaataggagataaaatcttcaaatctcattgataatgaatttagggaatagggactaatggaaggaggggcaacattagtccagaatcctacaggggatgagacaattcttaatgacacatttacaccagctgcaggtcga

SEQ ID NO: 6515 - DNA, 887 bp, Glycine max
agcttcgcatgcttgcagcaggtaattttcactttagattgcctgttattcattttcggatttactatataacatttaattaacaattagacattagaatgattcaatttggatcacttttatcagtatgagacacaatatactctattgtttgtttgtattttttccatccaatgttcacaaaaccagtgagaaatatttgttcctatatatattcaagtgtattgtcagaattttgttttttgaattcttccattacattacaatattacatattatcaaagttaaagagctatcctttgttgatggaaattatgatttgtttcatttttatacagtttttacttttccacagatgagcacggtattgtggcatgattgttgtatctaaatgctgcttttgtctttgtctgttgcccccattgttctctaagcaaaagtattcagtttgtatgtgaagttttgttacttgttatggaaaatcaagaaaatgttcttacactgtacatctactcctttttgaatggaattgtgacaaatattgtttactatgttttcctctcaggttcatgaaatggcgatggtctctgctgtccaagaagctcagaaggataatctcaggagtttcaatgattatatgatgaaagtattagaggttagtgtaatgatgtcttttatggtataatcctttattatgttttctattatcttgtaatttggggtttgatttcttttcatatttgactggagatatcttttgcagtaggccttggctaagctataaattcataaaactaccaaaataagaatccttggcatagtattagtaaacctttttttttttgcgtatttgatggggttttatatttcccttgcattgctgaaaa

SEQ ID NO: 6516 - DNA, 801 bp, Glycine max
tttgcaaaatagcaaagatcattgtagctgtgcgctcaacactgccaacgctgcttctggccatgatttcttggccttgaaaaccagcgttttggaaatgaaatgagtcaaattcattttggaatctttcttccctaattaattagttgttaatggatgcaaatgattgcctgcccaatttcctcgtggagccctttctattattcctatgttcatgtacatgtgcgtaagactacaaactttcttgtttatacgattggttctttccaaatagaatacaactatatatttttgttatttctataacaaaagttcaattcatcacttcgatcgatggtagagagaattaccacaatcattttaaagttaatctgattgattgattaatttacatcctgggattcgcaaactaaaattagctactactactgcttaagacacgtaggtcttgtttgtctttgattcggattcggatcccgattcacatcaatccgattagttcagattcaataaattagattccttgtattttctggataggattgattgagatcacgttttcagtcattttaacctgatctaatctcatatcatattttcaaatttataattaattatttgattattttacgtagacatttatttgatcattaataattaataataatacataatttttaatttaaattaacatttttttcacttggcatgttaatatatatatatatatttaattggttcaattattcagctgacaaatatccaaagggagattaaatcaaggatcatcaaatgtatcat

SEQ ID NO: 6517 - DNA, 870 bp, Glycine max
  misc_feature (813)..(813): n is a, c, g, or t
ttacgtaaaaaggaagtgtccctaaccaactaagacagatggcatctgctattcaatctggatgctataaaataacgcacatgcatttgttctgtgttgctttgttggcagctttcttctctgtatcaggcaaaaagacaattgtcaataagtatcagataaagcaccaaaattgaatgaaaacaaaatcactcaaacaaaacagtagttttacatttagatgcaagtagtttccaagtcaagattggtgtttgaggtgctattaactgataattaaaaatcaagtagttcccaaccaagttcatctagttattaagaaactactcgaaattttatttttcagttttcttctcttcctcacataaaagaaaattcaattaggattagcacaagacatcaaaatttcggggaaaaaattgtaaaccccaaaatttcggaaaggactgtctttttctttgtattttgaagcagatagtttactgttgttgtccgacatgagataggtctgaaaattggataagaacaaatagtacattgatagtcataagggcctgtttgtttgtgctttttatatgaagagaaaaaatatttctcagttaaaaatatatcaaattttttagacaatttgattaagttattcaggggaaaaaaaggctaaattcaaacaaaaacaaatttagtggatttctcttaagcaagaaagtgcagtttctaaaaatagttatacataaaagcattttttaaaataagcttatggacttagaagtctataactatttcagtgcatttaatttctttaatcttttgtacctnctctatacctaaaacggataaatcctacaaatactttttataaagcaaaattatgca

SEQ ID NO: 6518 - DNA, 861 bp, Glycine max
atggatgcatgagggcacaagacagatgattccatggtcaatcttttttttatgaaatgatagtcaatttccacatgctttgttatgtcaggattcagaagggctcttttctttccccttcattagagtgagctttccacccaaagcatcatcctttctttacatctttagatgaaatgaaagaccacttccctctctttcttttgaatacgccttgtgtcatgattaagatactttcattgcaccatctaacaatcttgaaatccaccctggatgcctttttctttgaagaaagcctctctctctctctctctcttcattcaatagctatggttgtccatttcaataaggatagtcctcgcctcatgagctagcttttgagactaaattaggcccaaccaaaattcaagaaactctcccagagtgatctattctttgtcatcaattattgaattacaagaataaagccttgaccctcttcttgaaaaaccttcctcgtgctttgaaaaggagcaattctcgtctgttcaatttctatgaacaatttcttttggcctcccaagctaatcctttttgtcaaatcttcaaggttagatttaatgtccccaaaagaagccagtcagtcaagccctaacaccacatcagctccttccccaatctcatttcctttcctttcctcttcaacctctcctagtatttggatttggacttagggcctaagtcaaccgcacaaattagcttgtaagggaatgattgtctaagctttataaggactaggtttagtcatatctctaatcgatgtgagatctcaacccctaagagtcagcatcctaatggttgtactctacgatacttcactca

SEQ ID NO: 6519 - DNA, 811 bp, Glycine max
agcttcgatgcctgcagtttgaaccgtaattaagtagctaagagtttattttacctaattaataataatatgactagtggggtgataaaaaaaattaaactgaccgaagagcgtacaccacaagaaaattgttgatttggaccaaaaaaaaatgttgaagaggattattattattattcccagtgggttggttgttcatttgtttatatatttatttttgggtgtacatcatttgtttgtatattgctatttgctacacttactcctccgtgcgtggtgcctttttagccgccagcaggcaatgacgcagaacttttcatcaccttcaatttaattaatcacgttgggttgagtttcagtagttttggatttaatttccttaaataaaatcttaaaatttgaattttatagattaaaaaaatataattaaaaaaattctattaaaaataaacagtcacattttccaataaaaattagtcataaataaaatagatacatctcacatcaatatcaagatcatcattgtgttttcaaattttatatacaatttgtttttctattgttttcttttatatatcatttcactctaagatatctgttacatttctactcttattctatcaatacttttactatggaaatataacataagtttgaattttagcaaattcaaactatcccattttgaaaagaattaatgtaaggtttaatgttgcagcagaaatcaatatttgtttttgaagtttgaggtttagaagaaaagagaaatacgacatttatttttgaataaatattctttagagtaatatcc

SEQ ID NO: 6520 - DNA, 824 bp, Glycine max
atacttgttgtagcttctttaatgatgtcttgtttcttaaactttttgcatatgtatttctggtggtgttgacatttctagtcacaatattcaccttattaatattataagatgtttgttgttgaaaaaaaaaaaaaacagtcaaataataccgcattggtctttataaactaaacttcccttccctaattgccacgatgatctcaatctcaatctcatccatctcctgttagcctaagcaacagtaaaatatgataatagaagcattaatgaattgaaatgttacctttctttatgcaatttttttttatacataaggaaaacatctttatgcaaatatttatatgcatgattgaatttccagtaagttatgatattatgataatagaagcaataataatgaattgatgaaactttacttctcttatgcaattatatgcatgattggatttgccctcaactgcacgctaacaatcataaacttgattttgttaaaaaagaagaagaagaagaagaaaagtttaattgctttatttttttaagtcgataaatttatatgtaaactacaaaatttaaaacacaaatgatgcattttgaatttaattttaattaaattaagatcgttcaacgacagtctgttggctaaatggtgttggagatttcttcgacaaaagggatgttttgtgggcggggctgctgaaaataaaatatggggacttccagaatgagccttactcacagccaaagtcgactaaatggtcattatggtggcgagacatatgggagttttgacaagcgaaatgctgctgcattaggaagagagt

SEQ ID NO: 6521 - DNA, 881 bp, Glycine max
  misc_feature (818)..(818): n is a, c, g, or t
ccaacatgatgaattagaggctaaattttttgaagagagagcagctctcgaggccaaataccaaaaattgtatcaaccactttacacaaaggtaaagctagaaagtttcattttaatgttataagctctatgtatgatgtgtagcataattcagtttcataatctgcctctttaaccatgcaattttcttttaatggattttagaatttaaagacagtgattatgaactctgctgggaccatggatctaataattaatatctttattctgacattgttatgattgaattcagcggtacgaaatagtaaatggtactacggaagttgaagaaggggcagtgaaagaaacagcacctgataatgaagaggatcaaggtaataattacaaatacatgaattttgtctattaacagtgtttcaattcaataatacttgatacaagaatttgctcgtgtagagaaaggagtgcctgcattttggcttactgctatgaaaaacaatgaagtgttggctgaggaggttagtctgttgggttcaatagttaattttaattttctggcatacatcttgcagccaattttcatgtttagtagtcttattgtttccttatgaaacatagatttcagagcgtgacgaaggtgctcttaagtatctcaaagatatcaagtggagcaggatagaaaaccctaaaggattcaagcttgactttttctttgataccaacccttattttaccaattctgtcttgacaaaaacatatcatatgattgatgaggatgaaccaatattggagaaagcaattggtaagcttattattgntattagggttttttttacgggaatatattatatattttatagtgtactttacctgttacaccc

SEQ ID NO: 6522 - DNA, 828 bp, Glycine max
atgatattttgtgacctcagctcggatttttcttctatctaccactaatgttctcaattcttggaactctgaaccaaaatgattattctgccgcattgcatccagagacgtgctttctccttttctgaaagttccagtaaaggaaaaagtacttccaattccaggctcacttacaaatccaatttctcctcccatgagatcaactagacatctactaatgctcagtcctattccagttccaccatatgttcgggaggtggaactgtcagcctgcataaaaggtgtgaatatgcggctttgtgcatctgtaggaattcctatacctgtgtcctcaactattactagaagttgaataatttcaggctcatttgtgccacttaacttcgtaaaattggcccaacttttccatctgttgcatacaggaaacccgcttaacgtatcatatgttctgtttgttatgtcctggcttaagtttaagccttctctcagcactgcgtccataatatgaagtgggtttttcacttcactcgccagatgaacagagacaaatacatgccctttatcatgagtaaactgaaatgcaccaagtaaactaattaatagattcattctcttttattctgaagataagaaaatccacgaatttaatatcaaaattcggagattatttaaaagtctaaatagaaggaaggtaaacatataaatccttcaaattgttgatgtattgttacaatatctgtccattgcattgcatgggtcacttactagtgaatatatatataaggtgatattgtaaagaactaatgaataaaaaccatatcattcaga

SEQ ID NO: 6523 - DNA, 836 bp, Glycine max
ttcccgagaattggagacttgattgaggttaacgtttgagcacgtcaaatggcttgcacacactattgttcctaggagcacttaatatctgttttacattcaaagcctttggccatcggccaaaaaaattgttttggcaaaaatttggaacggtcttatggtaagaaaaaatcaattaatttttcatggtgaagctaatgcaacaagtagttatttataccttttcataatatcaccattattatgtggagtagaattgattgtgttatgatatggtgatttgcaggaagtgaaggcattgacaagcttttgtcttctgaaaaggttagtagagatggtggtgttggtagtagatgactttctccattgccaaatctcataaacgaggaatcatacagaacttcaaaacaaacattaactttgcttgaggaagcacccgcggattcacacacttacttaatgacttaatcagtgatattggtacatcagatttgtatagtaggtagataacttagtctgaggagtttgtaacatcatcccagcgccatattgtgccatcctcacagcaactcaatatagtactacaacataacacaagaaacaactacaatttaaaacaaaaaaacaacattgcctcaaaattgtgagcggcaacatcaatatatgaagaattaccttccatcaaaggacgtagcagtctgcctgattggagattttgattgagggtgtgacaacctgaacaaggttgacacaaaataagaatttcataaaataaaaacgattgaaaaaatcttggtagataaacgaaccttgcaacagtacaggaggacttgact

SEQ ID NO: 6524 - DNA, 894 bp, Glycine max
atagttcaaaatgtgaagttgcgaagtgcggatcggaaatgtgagaaagccatgacttagtgacacttttgaatcggaggagagactttgacgggcaacctcaaaagaatttgatttatcatttcctgtggcgtctcatgctccgcgcctgcctctcttcgttttaacataatagtaatacatatataataaatataagaaatgcaaattacaactattccttctctaatagttttctctttttttatattttactatatctaatatgagtttaatgatcatattatcgtccaatcaaaatttatcgatgatttttaaaataattattataaaatttaataaatttatcatatttaaaaaaaatatatactctttgagtatataaccatttttttcatgcaatagtttaattatataaataagaaaaaatagtaatatataaatcattaagattttttaaattaatttatatttatcattaataatttttttagtatatatttgtatgtatcaacaaaattaatatacaaattatcaccaattgttagtgagattatgattaaaactaaaatatatcaaaagtaattatattgagatagtccattaaatatcttatcataaattatatttgaaaaaaaaaatatacattaatcatgtaaaaatttttacttattcaatcataattcatcctatatgataaatttattaacttttaaaataatttaaatagtaattttgattagataacattataaaaattgttttagggctgtgaatacataaatattaaattctaaacaaagtttacatatttttcaccatatttaaaactcaaattcttaaactttattttttttaataaattcttaactctcttaatgatatcactcttaa

SEQ ID NO: 6525 - DNA, 894 bp, Glycine max
ctcggaaccccgggttttctctagagtcgacctgcagatccccaaaaattagaagtcatgagaagttggcctactcctagcgatgtgaaatccttaaggggatttcttggactcactgggtattacaaacgtttcgttcaaaactatggtagaattgcaaggcctttgtataacttactaaagaaagatggctttaaatggaatgaggaggctgaggaagctaccagaaaattgaagattgcaatggcagaaattcctattctcactatatctgattttactcaacccttcactgtggagactgacgcgtctaataagggattaggggtagtgcttatgcagcaggggagaccattggcttttctaagccaaagtctctccaatagggctcagaaaaagtcagtttatgagagagaactcatggctattgtgttggcaatatagaaatggcgacactacttaatgggctgcaatttcgctatattgaccgatcagaaaagtctgaagtttttaactaatcagagattacttggtgaggatcagtttaaatggagctcaaagctaatggggtttgattttgatatagtttataagtcgggatgtgagaataaggaagctgatgcattgtctagaagaatgacatattcggccatttctatgatcaaattttttgatgaagatggggagtctgaagttttggcagacccgaaactgaaaaaaattatgcaggaattagtggtaaatggatctgcacatccaagatattccttgcatgataaaaaattatgatattcattcagggtttttcagaacatttaaaaggatagcagccttagtttatttgggagggtatgaggcaagacatcctacgatttatggctgcatgtgaacttg

SEQ ID NO: 6526 - DNA, 872 bp, Glycine max
tgattcgccagcttgatgcctgagggtagtttctgacagcctttacagcaagaggctctacccttaattccaactcatcagtcagcataggaggaggggttggggtgtttcaccttgggagcaatgactttctttaatagagacacgtgaaagacgggatggactttactctcgggtggtaggttgagctgataggccactttaccaatgaccttagaaatctgatatgatccataaaatctagggtttaatttctcattcaactttttagccaaagatttcaaccgatacggttgtaatttcaggtaaacccaatcgtctacagccaagttaacatccctacggtgcttattggcataggctcgcatctggtcctgagccttaagcaatttagttcggagttggtccaacaaagagtccctatcttgggtcattctattgacctcctctactgctgatggaacagtggtgcctttaagcaattggggtgggtctctgccatatagagccctgaaaggagtgagcttagatgaactattatagttagagttaaaccaaaattctgttcaacttaagcaggaaggtcagtgctttagtttttcccttgtaacacatcttaagtatgtttccactcctctattgaccacctcagtctggccgtccgtctgagggtgatatgctgaactaaatttctatttagttcctacacatttgaataattccctccaaaatgactttttagaaaaaattatcccagtcagaatgatggtgtttggaaacccatgcaatttcacaacctcttggacaaatagatcagctatgtcctttacagggaagggtgactaaggggataaaatgagctcctagttaat

SEQ ID NO: 6527 - DNA, 864 bp, Glycine max
acgccagacttgcatgcctgcagaatattgtgaatcccttggatgcattggcagcggatttgaaaaataaaacacatcttgtggggctagatttagaatgggatttgaaccagatcattgatgattcaagcaaagaaagagaaatacttgagaatctgcaaccttccagacatttggagcagttgtcaatcagcaactatggtggtaatgaatttccacgctggttatctgataaattattgaatgtggtgtccttaaacttgaaggactgtaaatattgcggacatttgcctcctcttggacttttgccatgtctcaaggacctgagaattagcggacttgattgggtggtgtgtattaaagctgctttttgtgggagtagtgattcttcattttcatccttggaaacattggaattctccgacatgaaggaatgggaagaatgggaattaatgacaggtgcttttccacgtctccaacgtctttctatacagcattgtcccaaactcaaagggcacttgccaaagcaactttgtcatttaaaggaactacttgttcaggactgcaaacaacttgtgacttttgcccccaaggccatagaaatttgtgaattagacttggaagactgtggaaagcttcacattgattatcatcctactactttgaaaaggctccagattagaggttacaacatggaggcatcgttacttgaaaggattgagcacatcatagcggatacttctcttgaatccttgcgcattagctattgtccgaatatgaatattccaatgaaccattgctacgatttccttgtaagattggagatctatgggggggttttgactctctaaagaccttgccttt

SEQ ID NO: 6528 - DNA, 858 bp, Glycine max
agcacgccttgaattccaccagcatatcctcgcaaaactatatcaacctatgtcatgccaatgttgaataggttaaaatcatttgccaatgtattattgctcccaaattcagttcatctttctactgacgttgcaaaaactaaggcatggtgttacattgagtgaactcttgttcctttatacttcaaatataatgcaaaaataaaataagtttcatatagtctaaaagaaacacatttatatgaagattggcatcgagcaaaactatggggaattgacagaatacacattccttttataagttatgaatgtaatgaatcagctaaagaggagacgtacatacataatttaaaatgatcttttttgacaaaaaaaagcattagagtaacttgctgaagttttgccaaatttctccggatactcctttttctctttctatttttacactaacttctctaattatttgaaaaatattacacctatatttcttgtacattatactcacctcccttaattatttgaaaatcattatactgtataccttcataaagactaggttttaaatatcggtcgcggtcacgtttcatcgcatttgttgatatcgcggataaataccgatgcagtctcaattgtgatcacaaacaattaaaaaatcttgatatttggcccaaatcacggttgcaggaccgttttttaaaacagaggttgctgtaaacattaaaaaagtaggagagttgtgtgcaatcttaagaaatcacagggagaattagtataattacgcaaaagtttatagagaagagaggctgaccattccaaaacaagggcatacacaaaactcaacatgactttcaatattac

SEQ ID NO: 6529 - DNA, 845 bp, Glycine max
aacagtcaaagaaaaccagaggtagcaattaactaagagaaaattaacaatataaatctgtttcaatcttaaataagaaaaaaaaaaagacattagtcttccatagctagtcactttaaatacatttatagcgggcaataccttacaccaagattcaatcacaaaagtgaaaattatatgtgatctagagctcttagaatttaagcttgttgctccaacttttctgcttgaaaggccctacacagcatataaagacctaattagctaagctgataaagtataaatactatgtagacatctaatattcaacaatatatttgctttgatgcatcaatagtccctaccttaatcagaatttgtgttacatcatcatagctagtgacatattcctcggtcagattctctatatacaatgcatttttggaatcatctttcatctgcaataatttagaccagccataataagcatgcagcaatggaaaactagtgtattagtcgataatgttttatgataaattgcagcacaaaaggatggcttatgcatgcctcaaggttccgctgggttggatcaagtaaatccccaatttgttggttgtatatctgtttcaaacaacaaatgaaaaagaaacaagatcattatcatacaaataaggaagccaaaatgggaagttttatgaagaattacctcaaggaaagaacatcgacattggtaattgaattgtttcccgtcagacacatgctgctcctaatatagtaattgaaaaataaataaaaaaaatagtcaaaacatcatagaaaatgattcagtgggtaaagcaggggagtaaacgtactctctcaagctc

SEQ ID NO: 6530 - DNA, 851 bp, Glycine max
aatctcctgcaattgtaataaaattgtgatcaatttgggacattcataatatgatgttgctccacaaaggcagagggtctattctgacgcacccaacattctccaacattaggacttaggagaccagcttaacagaaatttacaccaaagcaatatgacaataacttaattcaaagtggaagcgcattgcaaggatactagcacacaagctcaaaacaaataaagaaacatgaataagattttgtaatattcccaaccaaggccaaaatgaataaacactttaatcaatacaagagaattttagactgtcagtggtctctataaatcaacagtatatggaggagatctaaataatccaacttcaattcggaaccaagtagagtttagtgacttgagtccaatcactacttctgacatatttagttaggggtgatcaaggtctagtctagaatgtttagttcagtctgcggatcaacctcaaaccaaaccaaatttcacagttcacaatccataattcattggtgtttcaaatcctacaaataaactaacaagtctataatacacatatatgacattatatgagaaacatatgtaaaagatgatccatgcagtcaattacattgtaggaatgagatctaagacctccttcacatcataaaaaaccttttagctgctgctgattcattatcatcacgcacaacagaatgcaataactatgtgaatttgagatgattcatgcagtcaattacattttcatttttgggttttctttgcaatttgatttgtaccaatttgtttatacaattatcagcacaagcaaaagacttgatacagggactcgccaatttaaa

SEQ ID NO: 6531 - DNA, 862 bp, Glycine max
atgaatttgatgttgaccttgaggacattatggtcatggaagcaatttggctttccattcaggtaaggacttttgtttgaatatgcttatttgtaagtaagatattaatgattcaatttgttactaaaagtgaagatcaccacttccctgcaatatagtggttcgctacatgtcttaaaatcattcaaccacataccataaatctattgttttattgttgaatttgaaatcgttaagtttcagtttattttgttcatgatgtgtgatactgatgaaaattattaaattcttccaaaggagtgcaatgttttgatttgtcattgttgtacttcattctttattttctgcttcagaaaagtttttctggaatgaaataagtgtacaaatattcagaagtgagcttgctccagagcttgtgtataaatgtaaatgtagttcctaaatatttatgcaagtttgcatcttgtcagcttgcaataggactccaaaatccaaaacgaaggcccatcttttattataatgattttgggtaactgatagatttcttgggaaagtagccatactctgcaatccagatcttccctaatttttttaaagtttatatagatttgggttcattgtgtagtctgtacatggtagcatatccaccattcaaagtatacatacaactataaatatgtgcatattatgaaattcaatggtggatatactgccacagtaccagtgtgccacatacaagggttcagtgaaccataagtctatattgacactgctgctcaatggtttgtgttggccattttatttgatgattgtgattgactcaaaatgtatgtattcaaactacaggagaatgggcaggcag

SEQ ID NO: 6532 - DNA, 858 bp, Glycine max
actaaaatacataattacaacttgttttccgaacatacaccagcaaggaaaaataaaaatagaaagcaaactagcattgataacatcgaaaaaaactttgatcaaattaataacttgtgcaaaagaaaccatcaaattcctttgagaaaaaggaacaacagcaaacctagctcattaatatacatacacgattaaataaacgacacagatcgatgtttatggccaaagccaaaattaaccacggtaagtagacagtcaacgatttgattccacagctacaacaaaatagcaagtgttaacaaaattacggaattaaaaaccgaaaccaaagcgatcggatgcggatcagaactacaaatccaaaagaggatcgtaagatcaaacggtgccgccagatttggagcggtagagtttgccgaacacgtggagcgcggtgacgaagccgatgaagcagaggctcatcaccagcaccaccgtcggcgaaatcttcagccccggagcatcgtccgtgtagaacctcagcatgttgctgctgccgcctccgacgccggtgctggcgggagctgtttcctccgccgagacggcggcggcgcatgccagcggtggcggcggcggaaccgcggggagccatgcctgctggtcctggtcgcgtggctgttgaagtggaggactgagactgagaggaacctctggccatgacgcaaagatgaaggaagaaggaaacagaggaattgagagatacaaggcgaaaaacaattttgggggtaggaaagaaagaacaagggttacaaaaaattagaatggatacatcaagaattggtattattcccggggtaaaaaatataaaaatatcataca

SEQ ID NO: 6533 - DNA, 830 bp, Glycine max
gaccagctttaatgctatcaaataaatccaacgcctaaccaagaaggggaaaaataatcccaatgtcactcgagtatttactcatcgatttgaggctttttttaccgaaagtgcttggccagatgggtaaagtgcttctacattcgcagcttcttgatatgcgattgtgtgtaggtgtgtagctttactttatttttgtaaaagtattcactgatttccatttttttacactttcgttttattgttcaattatgggataatattcgaagaacacatgaacaaaatgaaactggaaaagttaaggggcgtttctttcgggaatatttaattatttccaaaacctcaggactaaaaaaaattatttcacgttctactaacatctcacaagtcgaccattcacatttaaaaagtatctttaaagtattaattttagaactttcaaataacaattttccctttaatatacctttcgcgttacatattttactttgccgtattttaggggctattaataatttataatatttcaaaactacaaattaattcttctttttactatttcacaatttgtaatattcagtattcacaggcaaaacaacgcacctagtcctacgtatcaaaatacccaagattttctatattgtatgcattttctaaaccgagatattaacatcataacatttagcgtagtgtttgttctgcaatcttcacatcactatagcctaaaagaaaaaatattataccaataaatctggttttcaaattggctcaagtttcaaattatagttacgcttctaaagattgttgggcccggctcacagatatgggcg

SEQ ID NO: 6534 - DNA, 834 bp, Glycine max
aggcacttacagcttaagttgttttgtttgtgacttatgactgatttactgagttttgtatgactttatttattgactttcttatgcttatgattataaatttaggcttaattaagtatttgatgtttgttataaaggtatttttctcttatatatgctattttatgcatatgtatgaattttatgctttgtgttatgattccatgattttagattctgttttcccttcctgagtatcttgagtttgactaccttggctggagaagtgtaaaatgcagttgttaatttgttcttgagactgaagtttattgtgcttctatgagtcatttgatagttgcttggtcagtgttatttatttcttaccgctaactagtttgttatgcataagtatattaaagagcaaaattgcttgcctactagatatcatttgggcataaagttgaatgcttataagatcttttgatacttgttcagcattttacatttttagttatttttttgtttgttttgagatgaatagcattattattttcaattttcaacatgcagctgggatggatatcaccctcacttttgcactatgatttttactatgattcttattgtttgtgtaaaatgtcttttatcttcatgtaccatgtttggctttcctagagaaatggaatgtcaactgattagatatcataatttaccatgtagcagtttgagtacatttggtattggcattactgcctattgaactaatgtctctaaatcctaacatatatattgtagggatcaatttatagactattggattcggggcaatatgctagctatggatttacccacaca

SEQ ID NO: 6535 - DNA, 799 bp, Glycine max
tttaaacatctattacagaagtaataatgagattgaaaccgaaccattattgaacaggtcattaattatttaaataaaaaatatttcaattaaagaattcaataaagaacttttctggagtttggggtggatgattggcaccacatggttatcaaactctcgacttaactcactaaatcttatgagtttacaagtctacttaccctctgtgagttgacttgtatgcaactcgctttttagtagattctctgtaaactctatgcaaactcggtagactctcgagtttgccaccaagtcagcactcgttttgggttgttttctgtgtgttaagggttcaacatacctccatttggtgtgttgttcttgaatcaaaccctcacctctaacaatatcaaaccatcaataagaatgttctaccactactatcacctctgcaagtaattatctagtaacgatgcattgctagacttgattatttaagtattgtggaatttagggtttattattttgctttattatgttgctaaaatgtttaattggtgtgttatttataggtatttttgttgttatttttatatgaagtagactcttaaaagtctatggaactttcacgaatctacatagactctcaagtttaataaccttgtggcaccagatgagagtccatgggctttatcaactcgacactactcatgctattatcctctccttatccatagtattgggattagtataaatgagggttagttctctagggtttatgaacatatggaacacatcaatacattgtataccttct

SEQ ID NO: 6536 - DNA, 874 bp, Glycine max
gccagacttgcatgcctgcagcctgtaggcaggctcatccctgtacttgttgtcgatgagctggagaatggccacagggaacttgatgaggaccttttcagtggtggcagagggattggtgttgtcagggaagtggtctttgacgagctcagtagctcactaatatcaattgaggggtagagaaaggagtcagggtggatcgacaggaatggtgagcatgtatcaaggtttgaagcaattacctcttagtacagagaatctctctggttagcacttccatgcaccagttcactgaaccaaaaactagttcacttcagttcttatgaaatacaattagtttgatttggttcaagttttggttttctatgctcacccgaatcttaccaggcctaccttgtagggtggcttgaaattctagactctacagtatatttttcatttgcatattcacttcaatatgagttgtgttatgtttgtctgtattgctcttagaaatttttggtagggacggtaggagtaatgatatctctcataatgatttggtttctaaatgcaggtggtggtgtacttgcatatacactcttgggagtggattacaatgaagcaagtggagattgtgcatttttaatactcgatccccactatacaggttcggatgacctaaagaaaatagtcaatggaggatggtgtgggtggaaaaaggctgttgatagcaagggaaagaatttcttcttgcatgataagttttataatctgctgctgcctcagagcccccacatggtttgaggcctagctttctatgaaaagagaactcccattataccaatttcttggcatactagagtaaatttcaattcgttgcctaacttttgag

SEQ ID NO: 6537 - DNA, 827 bp, Glycine max
actaggagcgacttcatcatatttggcaccatggtccaggaatctgttaatgcaaccacgtgctaattgtttttaatattgggtttgcatgataaaatagaaataaaaataacagcaagcagatgtactaaaagtgtacccaattgttacaaaattcaccaccataagaaaattgaaatcacaagtttactgcaaaattagtttattcttttggcagggtttctcagccaagaagaaattatagctttcctgacttaatgtcagctactgccagcatgcagatgcagttattgcatcatacattgcaactggtgtaattccatgcttagagattgaatctgttacattaatctgaccaagctaacattaaacttcaaaaatatttatcagatttaagcaatgcactgtgccagtgcttttttgcagttttttcatgtccttggaacacaacaggcatccataactctaacatagatggaacacatacctatccataactctaacatagttggaacacatacctataagctatgtatgaaactcatgtatgcatattactagtaattaacatttgtgtagaagacaccatgcattttaataaagaaaacctgattaatggattaagaagatttatgaacactatcaacacattcatactaatcagagtcaattgatataatataaaaataacttaaaagttaatgcaacatcgattcaatttcaaggcataaaaaccaggtattaccatatcttacctccaaaatgaagcgttgggcttgaaccataacttgcccaccatactgcactggcaggggcataagtaataa

SEQ ID NO: 6538 - DNA, 818 bp, Glycine max
aagaaaaattgttcaagtgtgaaaagaaaccaatgcacaattttgtcaatggaatcgttaacaattttcttttgttgcttttttatatgtagattcaagctgccttccgtacagatgaaatcaggaggacccctccaacaccacaagatgagatgagagcagggatgagctacttccatgaaacaatttggaacggtgttcccagatttctgcgccgtgtagacacagctttgaacaatatcgggattaaagagcgtgttccttataatgctccccttattcaattttcttcttggatggggggtgatcgggatggtattagtcttatttgtgattaaaaaaaatagtgtatattatcatagtacactggacatatggaatgatatgcaaattaaatatggtacaggtaatccaagagtaactcctgaagtgacaagggatgtttgcttattggctagaatgatggctgctaatttgtattattcccagatagaagatcttatgtttgaggtaatccatagctctggcatgttcataaaatgatcattgtggatggtttattactcttgaatcattttgctgatttcccttcttgtttctgtagctctctatgtggcgctgcaatgatgaactacgcgttcgtgcagaagaacttcacaggtcttccaagaaagatgaagttgcaaaacactatataggtgtttaccaaactctttaaactcgggggattatggggttttactttattttgtatggaagctgtaaacaatgatatctaaacaaggtcacatcacaatggaacaagctggtgtttactt

SEQ ID NO: 6539 - DNA, 864 bp, Glycine max
  misc_feature (812)..(812): n is a, c, g, or t
aacagtaagctatcttaaaactctgcccattgcaacttatttattctttaatcctcttacttgcatggctgttcacaatgttacatgtttaattgaagtcatgctatatacacgtatgtataacattcaaatgtatacacttgctattttatttaaaacggttttggaggcctggaactttttgctctatcatttagtatatgctttgtctagtaaattaagcctttggggcacacaatgcctatcttcaggcctaggattattttgtgcacaactgcacatgttgtagtatcgatttcaaacatggttcaaggaagtatgtgttgataatctttagagagaagtccgcatatatacaattctttgaagaagaaaaaaactgaaaaaaaatgcaactataaaatttgcatgatactgtcagttgccatcactgcataaggcaggtaataataactttattcaagtgatgctagatgctgcttaatatttgatctgaaggtagtcatgcaactgcatacctggttgtgtctttttccacctttctctcttatatgcttaaccatagttttgttctttatttaggcaggttcagattatgaaaaaaaatgttgatttccccatttcatgaacaaaataattgtgtaaagtcttacagacaagcaaaaactgagataatttaatagtttgcattcataaatcattgaaaattagggaaaattgcatttaatcaacacagaccatatctataaaacacagaatttaatagtttgtatttcttagatgtgggtttggacttaatcccaaagctaacncattaaatgggccaccaccgtgtcatccagcaccaagccatatactgggcgt

SEQ ID NO: 6540 - DNA, 785 bp, Glycine max
atattgatgctagagcaaaagggacactgaaagtaatctgaacacaagaacaacaaaaggtgtatattagtttaaagcaactgggtcattattcaaggttttcaacttttttccatgcttcagtgtttataattgtcctgtaaacctcgttttttatgtgacttcctcttcacatcaagaataaaggtcatatgtctatatttcattaaaaaaaagagtcatatatcttttatcattttttaaatctctatttgaattatgcaaatatcagacataaattaggtaatacctgccaacatattaagactgacatgaagtccaaacagaaattccaccagtcaaaacagtctaccttttaagacttttcaagattctttatacaaaactaataatcaaggagatataaatttgtactaaaatttctcttgtcgcatccattccttgtatgttttcaatttgcatttttgtcaacaaaatttatttgcttataaaatatatgctttaatatgttagtaggtccttaaattatttttaaaaaattaaataagtccttaaacaaactaatgtttttgtaatcgattatttagtttttcatacattttataattgagtccttcaaattaataaaactatcacaaatggttacttttatgatagtttcaagattttataaactaacttgagtaactcattataaaaaaggacacaattacaattttattttaatttaaaaaactaattaaaatttcaaaaaaaaaaactcatggtattaaaccaaaaaaaaa

SEQ ID NO: 6541 - DNA, 857 bp, Glycine max
tttcaattcctcaactctagatttgtgttgttggccattaaagacatatgtgccaaaaaaatagaaaattagaaaagtagttctaaacttatatacagacaatttgtgacagtgaccactcatgtaaaagtcttctacttaataacactttgtttgatacaactgaaatagtcagaaaataaatgtggaccggaggaagaaactcaatagaatagaagttagggtgcatgtgttgggttatgaagaagaaaaaagagacaatgaaattgaatagaaaaaaaagaaaaaaaagaaaaaaaatgagattatcaagttgaagaaaaataaaatagaatataaaataatatttaaattgaaattgtttgatgatataaagaggaaggggtataatattttttgaattccctgggttacactttatttatattgctatgttaatatagtgtaacctgggagtggtgttggtattttcaattttattgaacaatacttgtacatagattggagtatctttgtgtcctatacatataaatatatatcattacttttgctgattaaaaaaaaataaagttgtttgtagataagaaaagaaggttgataaattaatattaaatgaaaaatatattattatttaaattggaatcaatacgaatttaattaaaatattataatataaagacattttttatattattcaataataaattgccatatattttatttgattcagcagaattgccatacacgaatgggatttagagttcaagtaaacctcgatctagagctagaagtataacaagctaaatgtgatatatgcaatatgaatgataggtttagtctatatggtttgagtaaca

SEQ ID NO: 6542 - DNA, 842 bp, Glycine max
gtagctgatattatcgagccatcatgttataaaacttaggcaagtcaactagagttatcccaaattgaagatgtcagacagtttggtcaagtgagcaaaaatgttgttgttttcttattatatggatatcaataggttgggagtgtgatactcatttttttttaattgccacaacaatccttatcaagtacagctgatcatgatccatatcaagatgcaatagttacccccacaaagagattatcttgtgagttatcacctggtgacccatcatctgaagaagttccatctgcacagttgtctaccacaaaattacaaaacacattaaaattgaatgaagaaaaggataggcaaattatgtgttttgtttcatttaaattattatgtaatcctcagtgatgtttttttttaacaaactattcaacaaatgttattttgttattggagtcattattctttctggaatgtttattaaatttgcagactttacctacatatatggagtttaattcactagcagacaacaaaataaataaaattcaataatttattttaaacaaagtaattctccttacaaatgaagaaccgaacaaaaagctatatccaattaagaagtttggtggtcatgttattttaatctaactaatctaactgactctcattttcttacaatggtaattataattttttattaaccaacaattaatatcgttgatgatgcatgagctttaaaaaatcatcttctcaaataatcacacttcatatatcatatacaccatgtaaattgttagggaaaaagtatcatgactgatcaatcaaagctattaacgtagttgtccaac

SEQ ID NO: 6543 - DNA, 837 bp, Glycine max
acaaagttataccaaggccaaggtttcaggtgtataaaggttccagaaggagctaactggccacatccaaagacctcaccggatgtaaagttcaacttcatgatgaagcttctcaacaattcaactgtttctaaatgaattaaatactcctgagtagggaagaattgtgttctaaaacataatgtattttaagaagaaaaatccacaagaaaaggaccgtctgttattgaattgtgtacatgaaaaaaccaacgaattagaggaaaaatcacttgagaaccttttaggttgctccagtagcaaacattcgtgtatagtaattggcattctttggtatctgaaattctgaatgcattcagacaaataacaacgaccagaactggagttagaattgcctaagcccactaattgcaaaatacttaacccctatccataatttttacttagaaaaacaccctgtcatgtttgctctgctgtttatggattgaactttgataacaagagggcttgtcattttttttagagtttactaattagtgtcttaagaatgccaattaaagaattaaaagaaaatgggttttattagaaatcatatgagtgtatttaaaatcataggagaatgcatttttatgcatcctaataaaattattttttcttttacttccttaaccagtgttttaaggatattaattaacatttttttttttatatatgttttctcatttttcactttttctttgtcaagataagttgatatctaaaaaattattctctccgcaaatggaaaggccacatcttgtcagtgagccacgagtccaaacgcatataagaaaagaa

SEQ ID NO: 6544 - DNA, 872 bp, Glycine max
gcgccagcttgcatgcctgcagcccaggcttcattgcattgctgggttgtgctttgttttaagttctcttttattggtgttgaacaattttcaaccttcaagtaactcagtggtattggttgttggatttgttgtcttagcacatctgtgtataagcctttaattgttagaaaatgatgaagtggattaaagataggccttttgaaatcaattacttattagccgaattgctgctatttttagcctcaaatggagaaattattatatagtatagtctaggactatcatgtatgcatgattctgaatttctgaccaattttcgtgacttgtagtcgaattttgcaatttatgaggaagagataattaacattatgtgtcatatggagattaacttggactatgttagtttggaaccatgtaatagtttttccagggaatggttgtcattttgtaaaagattgggaaacacccttcattcaattgatcttattcaaacccttttttaagttcaccattgtaaacaatgtggagaatcatatacaggtatagtcacatactcacattacattatgcagtttcattttcacttcataggttttgatttcacctgatacaaagcattctgggcatgcatgctttccacttaatacactcagagatgtcaactttactggagataaaactctggagtttgaattctggaatttgcagggctagtcaagttattgatttgttcccaacagtgtcccccgaaattattgtccgtgaggcaaggttggaggactactgggggagtggcagagactcactgcaagtgcttcttcccctgaaattccttccatttagaatttgtgctgaggatagacaggatg

SEQ ID NO: 6545 - DNA, 861 bp, Glycine max
cacgatcaagaagctgaaattttattttctaatattttattaattttataaaagaggaaaaataaaattaaaggtggacaattgagttttattctctctctctaactgctgagaatcctcatcccgatcaagcaaaaagttggcagtggctgtcttcgaatctcgcttttttaagactataaatgctctgatttagcttgccacatacactatatgggaaatctgtaaagtttcttaagagataattttgaaaaatctaaggctttgtgctcacctactgtcacaaggataagagatcatttcaccaatatttctccaatcagaattgttaataatcttggaaaatatgagtctccctctactgtgagggagagtttcaaggacagtgtagtaaatattaagtaatgaatggccttctgtaaattaaaaaaagcaggcatagtttgtccagctaagtaggtaatactctttattcctatctgcactatgcaaatgcgttgagtacattagtgtacataaatgacaaggtatacagtatactatttcactttataagtgaggattttcaccatgaaatgaaactcttaaaacattttatatgttagagttagcattaagcttcctacgagttagcagctttagcataaactacactctttcatcaactacagcaatatccgatgtagcacattctccctctttcgcatatccgatgctttgcaagcaaccttggtcgtcacttgagtcatcctagaacaaccctgcctattcaaaagaagtacctcacctcacttacgaagaagtagcactcttgcatctatttcctcaataatggcctaccactgacatgctttacatgta

SEQ ID NO: 6546 - DNA, 820 bp, Glycine max
aaacttttttctttttctaaaaaccatgtggatgttccatctactcattaaggggcataaatgtaatcaatactttgccgttacatactatatatatagtcctcagatcctggcagcaaatatgtacttttagaaagctaatcaacgtggcttctctcaccctttaaatgccaccgtgtagcttcattatttttaaggcaatacctctagcatgctcttatcttttctatttgaagtgtgtattctcaatctcatcctttcttcaactatgaccaagtggttttatgggataatgggagcaacaacatggtgtaaggaagttttttctatgagggttttggctggcagtggcggttatgcagttgatcttttcataaaagttgtcattgctgaatttacttgcattctggcactaggtaattgttgaattgctagctaccgttgcctttgtcctgactcctgagaaattactgattcagagcacagtggctaacaaacacattgttatattatgttgcacatttcatcaattaggcataagttgaggtctaaatcaagcattcagtatatcattcttacagccttgctttataagatttttcttttatcggccagccaatgttaagataataattagtgctaagcattaaaccttgcatcctttattaaaaaaacaacaacaaaatgtcttatctcattaagtgaaagtcggttatatgaaccacacaacgttattggactcgattaaagactaaatcgtcagagatattatttatcgggagattctccttaactggattccctctaagtcattcctgga

SEQ ID NO: 6547 - DNA, 832 bp, Glycine max
gtaatatttggcggtagtttcaccacagccttcgctctgaatgatagaactaacgataatatgaaacggagcattaagcttgtcgaagaagaattaaagaacttcataaacagagccatagtgctgctgttttgtaggaacttccaccaatagcctcttcacaagttaactccctttaatgaaaaaggaaataagttgcaataatctattcagtgcgtagcgtctatttatacacacataagttactatcacgtccggatactcatttattgcacaagcgagactaattggatccagcggttgattatgcattaacttctcaacttttttaacacaaaaaaagaggaagtagatgggaattgacaccaacctcaagtgttttggcatgtacgtacggcgggattcaaaatatttactagtatgcgattgtaacttttttctttctaacccacgtctatatattctttactgtaagtaatttatgtccaattcaaataatattattatagttaataaaaaatttcctttaaatatttttatgactcaaatataagatcatttcgattaaattaaaataattttatattaattgatttacgtgtttggttgtaactttcattataaattattagtacttaatttcaattgatttgccgattaatataataatatctcaatcatcaataattgtgaaaatagtctgtaaaattaaagaaaactgatataagaatgataaattttgaaaataaattaattgtactatgagatgtttttttaacggtaaattagttgggcgcgccacgttagttggtgctgaatagggcaaagttga

SEQ ID NO: 6548 - DNA, 806 bp, Glycine max
atgtacattggattagtggcttgcctatgtcacaatatcctatcaaattggttgttaaaatgtacttcccattagctataaaaaattgcacaaagagaagatttaaaaataggacttaaaatattagtagctaaacaacaaatggtgaatacaaccttcttcattgttagatggttcatcttcatcaaagcttgaagctgaaacaaaattaaatcctaatatatgataaaacaaaagtcaggtgaagcattaagacaacatgttcacatacgcaacattattccggttacctgcattaaattgttgcttaatagtagaatcaatatggtctgcaacttgagatgttaagccctaaactttatcagaaaaattaaattgatcagcaagatcaaacctcttgtttaggtcaagaggttgtaggtgtactgtctctgagggagctccctgctggaagtgaatgttggatttcatatgcgttataggagtattgtttggctaaataatatcaattgaggattgttgaagatgtaagcattttcccttagcatgttttttttttgtttttttcatcttacatcttcatttcatccttgctttagctacaacatatttttgtttctgactgtaccctctattattatgttgtctaaagaatgttcatcttctatgttgctggaactgatatgtggtctaattcgggaagaggattgtgaacattgcaagttcttactttcagcatattttttttctttcaacaaaagttttctcctgatccttgcttgaaatgcacatccttctttgctctg

SEQ ID NO: 6549 - DNA, 825 bp, Glycine max
gaaacagaataacataatgaaagcaactgcaaatatacaaggcggggcgtcacaatgaatttacttacaaaagttgatgtcatgccagcaaaagcacctgctgcaagtcttcccagaacagagagctcaccatcctttcccttgaatattttctataaatccaaaagtataacttagtcatgaacatgcaatattggggaaaagaaattcatgaaagaaagtttaacagctaaccttgtaaatttcataagcaaaaagctggacagcactgtaaggtataacccgaatcacctggaacattaaaagtagaaacactaaaacaaatgaaaaacactaatcaacataaaaagaagatatatacatacagaaataccaattaccaataaatttgttcctaattatagagacctgggggaggttgcccttccaataacctttgatgccttcttccttccctattacagttaaggcctgtaaatcatatcaatgtaagctccaacaaaaatttcataggtaacgttctgatcattcaccggagaacccaatgcaacaaagtacaacacaggaagataattaattagcgacttaagaaaaccttctatcagttagttggaatttctcaaacacaatttgacaatttccattctaataaacagctacagttgaaattacagggtttcaatggaaaaggagagaaacaccctctaaaaaattgaaatctctgattatataatttgttcacaaatgtacttaattgaggtcaagtactgtagtagcataactagtaaaagcctatttcgtgaagacttaaccatgacttgtaaa

SEQ ID NO: 6550 - DNA, 846 bp, Glycine max
ttgaaattggtgtatgcgttactagtttttttattatactgactcgtctaatgatttagagctgagactgaattaagtaattttaatcattgtttaaaattatccgttgatgttttaacatcataatttcatgatttggtatgtaaacgaatatgcaatatcaaatttattattttctcaataactgagattgctaatcttactcttgtgagtttcactttggagttgttattatttttaacaataacagtgctaaaaaatagctatggctattaattatttttagttaccgattggttagtaagctggtacgttctaaaatctatacattttagtccttattaaataattaaataatgttttagaatttatatttagaatgttttttattttgtaataggcgaaaacctgaaaggatatgatgaaatatcacatttaatatggactagatgattcgtatatagtaatcatattcaaagtgaccagcaaatcaacagtatgtgagaccttcaattcaatggagtggtaaaaccagacttatgaatttacaaaaaataataatatcaactcaactatcaatgtttcaactttcaagcaaaaaataaagatgttaggcaatttatgggtggtatgaatcgtaacaagagaataaaaaaggatatcaaattcataaagttgggtttgctttggttaaacatgagaaaatgccaagatttaaatgtataacagacaaaattctagcacccagaagtacactttccccccgtttgcaataaatttctcaaaaatgctgccatgagtgcaatgcttaaaacattgtggtacatgggaagcagatcattgctg

SEQ ID NO: 6551 - DNA, 865 bp, Glycine max
cgccagcttgcatgcctgcagtttattttgaaactgctattctatatagacacacgcgcgtgtatgtatataatattaacaaaagaaaaaataaataaataaccgattacaaatgcacttgtattataataatagagattcagcctaatgttttacagaaaagatattatttcaggaaaaaaaactgaaaaacaatttattatgatatcctgtcaaatattttaaaaaagaacggtgctgttgctatgttacgaaagaaaaatgactcttaatatactataattttgagatgcatttctaatatacaggtacacaaaacataaaaagcaaaagaaaagtaatgtatgatttcacctgtcttaattttttgatattcaacaaatataaccgatgttacgaaggagtgtgtatcagtcatctattctatgcatggatctctcacttactagaaatttccagtgaggatccatacaagttacaaaacatgtcccaagccaacaacaaaaaaccttgccaacaagcacgatttttacactattatatccaaggctgaatagacagatcaagtataattgatccaaaatagtaagtataatgcttgcagaaatttttggcggacttactaagaagtaatgaacctagcttaatattcatgttgcaactaccaactttcgataccttccatctcctttcagcaactaaagtctaaatcctcaaaaaaataaacggtaggggtagatctcttctaccgtaaaactcatttcccagaagggacccccatacaataattcaagaaatattgattgtgcagtaagtggaggctctaggaagcatttcgcattgttcaagacatccctttcccttt

SEQ ID NO: 6552 - DNA, 847 bp, Glycine max
cgccagcttgcatgcctgcagtttttagatcctcagaaaattaaattatcttaacagaaattacaggtttgttgatatgctttggcatttgacaagtcacagtgtggttacataatgaatatgcataaagctttggcttcaaaatggttttcaatttttcatattcaacatctagttaattctaggtggttaaacaaaacacctaaagaaaaacagaactttgaaagaaacaacatggctgagaatagatttcgaagttcacctaacatatgaagactaaattccacataaataattaatcataatatatatttttttaattattactagtcatttatgccacaaattttctagggcatacttttttaacaaatttgaagagatgacgtcttatgtctgtctggagatcttcctgcatattctccagaagtatttcttcattcactcctcttgttgctgcccaactataccgttcagcatgacgtactctcctacatggaagatataatacttatcagttgtacattatgtgtgatccaaaacatgtaacatagaacctacgtagtgattaaatggagttggttattaaagaaagactctaatccaaacagtaactagtctatttttcccagtacatgtactttttcaagaaaaggagttgtaggaagaggggggggagttaacaagcaatgaattgaatcaaccatagacataactttttgaaatgttggatgttggggattttgaaaagaatgagaacatctcctataccttcttagatcttcgggtaagcgacggtggctcatccattgctcaacatcacgacctctaagttgcatttctagcc

SEQ ID NO: 6553 - DNA, 813 bp, Glycine max
accccctcgccgtcgtcgcattggttcccaaagacgccgccctctttctcgccggcgcccttgccggcgccgccgcgaaatccttcactgcccccctcgaccgcatcaagctcctcatgcaggtgcgctttcgcttcgtttcacgtttttgcgcgaataattctttttttatcgccgttttttttttatttagtcgatagtttttgttagtggaagattcgaacccacgacgtatctctcaatcccttcaccgtttacagccaacccaatcttgagaagatatgtgatgagttggatggttaaaggagaaagtaagagaaatgtggtggattcgattccatttgttaacaaaaaataattagacattctaataaactaacatttgccgataattaaaaaaaaaaaaagccaaccttattatgtctccgcgtgaatatgtctgtgtctgaaagttcggtcaaatgagtaaacgacattgcgtatttgcagactcacggcgtgcgagttggacacggaagcgcgaagaaggcgattggtttcattgaggtattgactgttcgcaacttcttttgcggtgtttggttctgtttttgatattaatttacgtcaccatggttgaattttataatgcgcgtgtctttgtgatataatttaaaaattatgcttaggttgaccaatgaccatgaatcatgggttatttttatattagtgcttctcttggtaatggattttgacatggaaaatggggccatgttcccgtgtatctttgggaaaaagtttttttaattgattattttaggggggggttaaggg

SEQ ID NO: 6554 - DNA, 826 bp, Glycine max
atgtagtgcgccagaccagagatcttctgctctttgttgatcgcagccccgaaacccgcgaaagcaaacgtgaagagaaggttcatctcgtttcattatctttagatctcaaaatttaaatttgtatactttttaaatttttttttcgtgagtctgatctcaactaaactctctgctattgtgcttgctctctgattaaataaaaaaaaagctctttatttgaattcccaatgcttaataacatcattacatcaccgttgagcggaaccttagagtcttgattggtgcatcagaataaccactgtgctgtttatgatgttctttatcttgataattgctactgtatcttatgagaacgttagtttagtttagaacataatatgattaatcactgtagtaggtgatgatttgttttaaatatttcaattgttggtggttgatgctcgtgttttagtattgcaatttttgttcagttgttcggttttgcgagtataattgagcttgacatgccatcatcaggcattatacgagcagtagtagaatttgtgtgagcaaaaatgaactgctggaattattttgtttgttttttttttcttggatcttggcttcttgtgccagcgaagtcacccccacccattcttatttgatgtttgtgtggtctatctaacagcagatgtccgagctatttaaaaatatcagggagctaaagtcaatcctgtatggaaatagtgaatctgaaccagtgtctgaagcctgtgcgccagttgactcaggagttctttaaggaggatacgttgcgactgcttatcaagtgtcttccaaattg

SEQ ID NO: 6555 - DNA, 827 bp, Glycine max
atgtagtgcgccagaccagagatcttctgctctttgttgatcgcagccccgaaacccgcgaaagcaaacgtgaggagaaggttcatctcgtttcattatctttggatctcaaattttaaatttttatgcttttgtttttatcttcgtgagtctgatctcaactaactctctgcaattgtgtttgctcgctgataaataaataaaaataaagctctttattggattcccaatgcttaataacatcattacatcaccgttgagcggaaccttagagccttgattggtgaatcagaataatctctgtgctgttgatgatgttcttttacttgatgattgctactgtatcttattagttcagtttagcgcataatatgattaatcactgtagtaggtggtgatttgttttacatatttcaattgttggtggttaatgctcgcgttttggtattccaatttttgttcctttgtttggctttgcgaggcggagcttagtggtaagtataattgagctcgacatgccatcatcaggcattatacgagcagtagtgggaatttgtgtgagcaaaaatgaactgctggaattattttgcttgttttttttattggatcttggcttcttgggccggcaaagtcacccgccccgttcttatttgatgttcgtgtggtccatctaacagcagatgtccgagctatttaaaaatatcagggagcctaaagtcaatcctgtatggaaatagtgaatctgaaccagtctcagaagctgtgcgcagttgactcaggagttcttttaaggaggacacgttgcgactgcttatcaaatgtctttc

SEQ ID NO: 6556 - DNA, 825 bp, Glycine max
tgcagcactataatgtaaaagcctaagtcacacatacaaatgcaatttggtaacatcacaaagttaataattttttaacccttttgcacaatgttttatttataatagactatttagaatttcaatcattaaactcattttaatagatcctaatgtcaaaaataaatataagtcttgctccagtccgggccagacgccacatcatggcaagatgtgtgggatcaaattcaaccttcaaggatgtgtttacagttcagttcctcgaaccaataacttgcgagaagatgtcacaattcacaaccagtaaaccatttttttactactttactcaactacaatggtttatttataaatatgtgctagtataactctgaatttcttcatacttcataattacatggtccacttgataacctggaccagtaattctggttaagttggccaaccagctgagaaagaccattaccacaagtcatggcagaggccccaagcatgctgctctatggctagtgactagcgcacaatggctgacaaatttctcagtggttaacgacctagcgaatggattattgcaattgcagtatcacacagcaatatatatcacaaagcggtgctaaaaaaattcaaatcttctgaatttctctgatgtcaacaaaagattgcagagtgaaaaaaagagatgcatggcatgctgatctgggctccactttcttaacaactggcgctgatggggtgcgtgtgcactattctgaaaaagtagtacttttttttgcttaacaccaaactaccagcaccagaagctgcttttaccacaatgcagctttt

SEQ ID NO: 6557 - DNA, 842 bp, Glycine max
tcctctagagtcgacctgcagaattgtgttgttttctctcctttgggggtcaaacaagcggttctcttcatggtaatcaatcttatccttcttctttcatgcattatattcattcattcactgttcttctcttccacaactctgtctgtgtttttctcttttacttaaaaaaatatttggtgagaaattattgcgtatgatctgaaaccactgcatgttcgtaagttcagccaatattcatatcacacataatagaattgtattctctctcttttttttagtaaattcaaaaacttgttcacatgttaagagaagattgaccgacatgaaaacgtgataatcaatgaattaatcgctagacttagtaattagcttctaccgtgtgacataacagttttttcttcttatatatgttatttgttgaatttggttaattttgagtttatatttgtttggttttttatttataaactttaatggggttgttttgttgttgtggttgttggtttgtttcctttttctcccacaaaatttagtgacatactgaatttggtttgatatgatatgattttgattttgctgagtctctgattggtactgttgcatgtgatagatgccaagtgttaaccctgacaaagattccgagccatttgttgagaccgatccaaccggtcgctatggtagatacagtgagttgctcggatgtggtgctgtgaagaaagtgtaccgtgcatttgatcaagaagaagaaatagaggtggcatggaaccaggttaagctgagaacttctgtgatgaccctgccatgttggataggctttactctgaagggagggtgctcaa

SEQ ID NO: 6558 - DNA, 817 bp, Glycine max
ttgcactcaggattttggggtgtgggtggtacacgtcttcgaaagctcttgacttgcactgccacgatttcacccacgcactcgccattgcatgtaaagtgtaatgtaatggaatgtttgggtttgggtttgggttttgatgttctaggggaaagagaagaagagaaagagagacaatggtggaagagagagtcaagaagagacattgtaatggtgcgataataaatgggattctttttattattattattacagtaacttcgtatgcgttacgaaatcatggttttgttctgctcttctgaagattgcccaattgcccacgcggattctgtctcatcctttcactgtttatactgtacaaaacaaaaagcttattttaattgattaagacattaaaaataaaaaatatttattattaaatttataaaaaaaacgttaaaatattataaataatacggttttacacattcaaataaaaatatatatttttttataccaaagaacgtgaaaattataaaaatattttaaggaaataatacttctttcgtttttttacgtttttaattataaatttttttcaactaattcacgttcctaaaaaaaattaattaatttagttaatcacattaaatttatcaattaataataccattatttcaaaatcatttttttcttatttctctttctatttaattatttttcataactaactatgaataggtaaaatacaaataaatttttgaaaaaatcttaaggaaagaattactttttaccaaacaaaaactgacgaagcaagacaaattcaatttggtcggca

SEQ ID NO: 6559 - DNA, 814 bp, Glycine max
accagtccatcctgaaaccatgtcatcatctgcatactcccatgtgccacttgatggttcatatacaacagcaaatacatgaggagttacaggatatctgctacatcggacgtatatcttcccgtcaagaaccactgaatctttaatttcattaacaattttaggatctgtctgagatgtccaacaatttgtcaaagggtcaaaagtctcccaagaatgataacttgactttgaacctcctcccccgatagcatatagttttttatccaaaacttcacaaccaaagttgtacctgaaaattttagtagaagaaaacagtgatctctgaattgcagtaggggttaaaattaggactgacgaggacaacatggtatttgaacttttaatagcaaaatatagacagctataattgataaccaaaatatatagtagatctttctttgaccatattatgaaagcatgatcccaaattagttcttgatacagccatcagtttccttcctccttattcctacttcccattcttattcattaaaaaaggagagtcaaatatgtttttagtccctgtacttctagtaaaaattggtaataatccttgttctttaactttgatcaatttgattcttgaactttagaaaaacagtggtttttgtccctcctcacagacgattttcactgtaaaaatggacgataaccattccttttgtaaagttcatgattaaaattgatcaaagttgaagtttggggactaaaccatatttcacaaaaaaaaaaaaaaaagacaaattgaagtcactagtcatgacaaggaata

SEQ ID NO: 6560 - DNA, 883 bp, Glycine max
ggactcggtacccggtttatcctctaggatcgacctgcagttagctaaaaagtataattaaatacttttcacaaattgtacccttaatgtatggaagataatttaatttaccctttaatcttcttattagcaagattgaaataccatcgttaaattctctcaagaacccatcgaaatttaattttggaagcttttttgatgttttatgtttgcatctttttttaattattttaatgatatggttcaattttttatcttttctaaaggcattatgttacttaagttaaagtactgaaatcagagagaggttttaacttaataacattggctcattttcgtattctctctcttattcacacggaaatacattgtaaagtcgggaattttcttctcatcgtggtatatacaataaacttcttacaaatacataatggtagctaattggatcgatatagtatgttaaaataatgtctatctataatattttttaattgcacaatgctaaaactatgacatcaatatctattgacaaatagtataattggtaattttaaatttatggtcatagcattcttcactgaaccccagagatcaacaaacccttctagttgttggagataatgcaaaaggacggttagtgaattgtattgatggagaggttggtattttatgattatctacattctttttgtgatgcatccttgtaaagtactttctctatttcatatcaattgttgtttgagcatttttttttctttttctattgatgagtttttcagtttttaatgaaacattgtaggggcaatatttaaatatgcaaaattaaaggagaaagtaaagatatttagtaaaattgaccccatatagatgctattatcttaaa

SEQ ID NO: 6561 - DNA, 860 bp, Glycine max
acttctatcgccaagcttgccatgcctgcagctaagtaatggttgctttgatttcaaggagcgacaatgccaccaggcattcatagttagatggcagggcaaacaagcctttattagaaaatgacttgacgtgattagcagcaactcaccaactgaacttgtcttggttcactaaaaatacatgaaatgtcatgtattttttttttttaaaaaagaaaactacaagtaaatattccttctctgttttttttttaaaaaaaaaagttaaaaccaacaaaagctataagaagcaaagtagtataattaagttaattaattaggtagattaatgttataaattgtttgatattgtcttcgacttatataaaaaaaaaactattaggtggggtaatttttgatttcctcatctcatcacaaaaaatcacctcaatctgcgctcagactaatgaaattgaaacaactacgtgtgaagacccaacatacgcttaccaacaaaattactgaaatgcaatcatgtatatcgttccaactcgtaattaaagcacttgttcgcttcttagagtctataatgatatcatattaaaatcactttagggagtggcggagccataatcttagcttggagaagtagaaattactcaatttcatcccacaaaaagaggattataatttcaaccagaagggcaaactctactagtacttattattactacaaacacaaatacgtaaaaggagcaagaaaatgaagaatgttacccacgccggtctgttttagttctcacaatgtgatcaacaacaaacacattgatcacaccctctcatgtggacaagaggtttcacatgtccaagtctcccttact

SEQ ID NO: 6562 - DNA, 869 bp, Glycine max
gattcgccagcttgatgcctgcggtttaaagcaatttgttaagatggctacttgtttgtgagtaacactattttctatttacagggttgggaaagaaagataatgtgtattttcacatttctttttggccacctacctggcgtatcaagctgttgtcctttctcacggataacctctccaagctgagacttatcaagtgcctgagaaaaattaaaacccaacaatcacacaatgcacaaccttctattcaaatagtcataattttcaaaaatcaaggattattggtctgttttcttatactgagtaagagcttaggagtgaagatatagagtggtttattgggtttataaaatggtattcatcagagtaaacaaacaatctttcaaattagaaactgaaataacttgtcagtcatggacaggtaatccagtatccaattttgattagtaccaggtttcttttgaataccaaatttagctcagatggagggttacttttggcatatgtggtgagttttcttcctttatttgcggaaggtacatatgtggaggaagtttgttaagtatgagaatagtggaggctctgcttggtttgtttttggtggggatgtttgaaggaagtttactgcataggttacttctaaaccaagtataggagattttttctttatattattgacttcaggttctcattctcccctttattaatatctggttttctggtttgatctctttgcttagatatcctgacccctctattggtccttaatcctgccttattaacaatatttccatttcaataacataatttggctgttatagacatagacatccaaaacctgaatacaagtaactgtataagcatttttc

SEQ ID NO: 6563 - DNA, 843 bp, Glycine max
gccaagcttgcatgcctgtcagcagagctcggccagagcacaagttgtcgctgtcctacactccaattatctccattttctagaactgcatgtttcaaagtaatttgttgggatggctacttgtttgtgaattgtgactatcactatttttctatttacgggatgggcaaagaaagatactgtgtattttcacatttctttttggccacctacctggtgtgtcaagctgttgtcctttctcacggataacctctccaagctgagacttatcaagagcctgagaaaaattaaaaaccaacaatcacacaatgcacagccttctaatcaaatagtcataattttcacggattattggtctattttcttatactgagttcttgcttaggagtgaagatataaagtggtttatggtactcatcagagtaaacgaacaatctttcaaattaggaacagaaataacttgtcagtcatggacaggtaattcagcatccacttttgattagttccaggtttcttttggataccaaatttagctcagatggagggttatttttggcatatgtggtgagttttcttcctttatttgcggaaggtacatggtgaaggaagtttgttaggtatgatgatagtggaggctctgcttggtttgtttttggtggggatggttggaggaaagttactgcataggttacttctaaaccaagtataggagagtttttatttatattattgacttcatcttctcatttctccccctttatttatatctgttttctgtttgatctcttggcttagatgtcctgacccctctattgttcctaaatcctgccttattaacaatat

SEQ ID NO: 6564 - DNA, 854 bp, Glycine max
  misc_feature (805)..(805): n is a, c, g, or t
caatgctgtaaccattggtaacccccatctaatagggctattttgattctcatatgtttcatttgtttttttctgtcctgtggtagtaactgaaggcttttcaagtggggttggagtagtagtacttctagttgaagagggaagagcatgagttgatggagtccaatactcctcaggatgaatgcaatttaatggggtttgacgtttggtccttgtcctatctcttactttcttccttgcaaccgcgtctctgagcttgctgatatccggttcgggcaatttatatacaactcttgtcatgcccttttcagattttgaggagctactacttgttctaggtgtttgccagtataaccaattggaaattgatcttattgcctgaattgctgacattcttgattctctttggaggtctgtttcctgaatgagatgttaactagttaatccatttagtagagaatgagtgaggaatacaatacaaggattgaagatttagcataattatgatcattcttgctttttatgtagtcatgcatcacatgtcaaactaaccttagaacacttattagccttttccattgcttcctggaatctagtctgaaacttttccacatctacaaatatgttagagacacgagcaccggctgtatgacctgcacctactcttacgttgccacgaggctgcttggacatcaagaactccaaagctgcaaggttggacctctcaacgaccctattttattccaaagaagaatgctcatttacaacaagtaaaataaaaagggagaactgtgatttaagactnctgacaaacatttttcgttttagtccttagtcacactctaaaaagatat

SEQ ID NO: 6565 - DNA, 783 bp, Glycine max
tgagaccctttcagctggtatagtatctactttgttagctttcttagctccaactaagaccctttcagccgagctgctgccaccagctacctttgcaacaatcttgcggttaccagggcgcatgcttctgactttcactgacgaatcacgtacaggcgatgtagaaggcatgcttctgactctagctgaagaatcacgcagatacgatgtgctagaacgtgtgcttatgacattcactgaaggatcacccacgggtgatgtgctagaactctcgagtttctccgtcaatgttttgatgacaaggtctctaagttgtagaccagttttgtgttcacgagtgttcttggagtagaacactagagcattgttgctcaggagtagcaagtctcttaaaagttctaccacggacttgattgttccgttgtggattcttgactttatggtgtcaaaataccacatgctgccggatcaatttctcgtatcttccttgcttctgttataatgaatcatgtatcagggcatattccttgtctcaactcaaggcttaaattaaatcctatttgttatagctaaacaatttcaaaaggaataacatgaaaagagccaaatgcttggtttcagaggtgaaaatggagtaatgaatggaaactataattttttacttgtagaaaaacatttaaaaagaacataaaggattgttgaaatttatatttgcctgtattgcctagtatctgtgcaactatagaataaaatggattactctctaattattatactatctta

SEQ ID NO: 6566 - DNA, 894 bp, Glycine max
tcgacctgcagttacagctggacaacctagctcaacttctgatgatccagaagccgtttccctcattggaaacatcaaggatgaagcaaaccagataaaccagaaagaaatactttggggggtgagtcctttattatattggcaaaactagacaatgttataaactatcttgctctttttgtttctatcaatgcaacccagtttcttacctttgcaagcttttgttgtaacaaaaagtgtattaataacatgttgaatacctgaaactttcaaaactaaaaaatgctaacttttctgcgattcccagttttaatgccttggtcaacagtcaatttaaagaatacagagagagagagaaaaggagaaaggagttttcattatctgtttgtgaaaatgattcaaaattgcaagagtgctaggactctgttatttatacaagagagaagcttacacagtaagctagacctagatcctaactaactccagcaagcacagctggctatctaacactaacagttgtgctgagtcagcattctgactcagcttactatataactgtaacatctgttacatcccctgtcataatttcatcattttacttggattgatgtgtggaatactaattttgaatgaacagaatctttgattgtgcccgacttaagagtagtgtgatatagaatttagatgggaaagagaaagaaacagaaagacagagaaataaaggggagaaggggaagaacagaatagagaggatagaaagaggagagaacagagagatcaaagaactgtgcactgaacttctgttattattgtttcagcttgtctaaaatatacagccctactttattataggcagctacccacagctatgaaatctaatctacagtagctgac

SEQ ID NO: 6567 - DNA, 863 bp, Glycine max
ttgtagagcagcaagccaaagacaaccacagtaagtgctcacaccatggactgtccatgtatcgtatgtttgatcagggaacccatcattctcaataagaccatccccatctctatcaaattgttccatgtactccattgcagcacggacagcaggccacacatccactccaaattccaaatcacctgtagtagcaaaatctcgatacacctgaagaacaaattttgggttcaggtccttccacttgctagtatcatggatgttataggcattcatttcatgccatggatcatgtgtccccaaatcatgtggcactgctccataaaccttgcgaatgccccagtttccctctgccagaaactttacttttcttccatcttcacacaagacagctctagcaaagtcacgctgtatatttaattcaatcttaggaaagagctcaagaagggcaaatgacgcatagaagtgcacatcatatgtgcaccacatgatatattccactccttccaagtacaagaaccttccaacatcagcatcatcatctccagatagtttttcatccgcaggatcatgtcctgtaataacagcagaatcacaggtactatccattatacgctccacaactgtcctttttctgtcactcattttatcttcagtttctttcacaactgtattttccaactcccttacccgatcctgatcattccgcatattcgaagatagcaaaggagagtctggaagaaagataaaagcagtcttaatgatttcattaagaaaaaactgataataggcatctccaatgacaaaccagatgtcattgaaaaataagtgcatacatatgcttattattatacatacaatcc

SEQ ID NO: 6568 - DNA, 1292 bp, Glycine max
  misc_feature (1279)..(1279): n is a, c, g, or t
ggacactggcagatggtggtcatcctgcccaaggaacacttagttgtctggttttgttcattgcataacaggccagacaactaccttaaggggattattaataggttagtgttcttttcaatacatttgcattgtaatacctcgacgtacaacaccaatttttaattgttactcatatggaacagtgctatcaagggtcttgatgatgctccacagcctaaatcaaaggcttctgctaggtggattgtcgtcaaggtacatcatttacataaaacttccacttatatatatttctttatgtgtctatacactagttgtttaattaatatccaattttcattatgtatttagtgtaatagacaaaaaggaagtactgagtgcggctactatgtgatgcactggatgtccaccatcattttaggaacttttagaaataattgggaagcggtaagtttatttcaaacaaaatcgatttatttataatttgtattacattaataacttattatgatttatttcatcatgcagtattttaacgatcatagacaattggagccagagagattaaaagcattgcggatccagtggacacagttttatctccaagttagagatcacgcctaggatttagggacattatctttagctttagtttttactttggtttaacattttttacattttctatgtaacatgaacattgaattcatttgatgattgttctttatgataaatcaattatttgatgtttattatcattaaaactgcttgaaagcagaataaaatgtttatttgctgtgaattgggcctgaaattgcatttgacaggtacaattttgggtttactgtaaaaacagaaagtaaatataaaaaaaatagttgaaaacaacatcggttattaccaaaaactgatgttaatatcataaacaacatcgattatttacaaaaaccgatgtcgacatgaaccttaacatcggttgtaatagaaaaccgatgttaacgtttgtatattaacatcggtgttagtgcttagctttactaagctttaaaagattggctaagattttgttaaaacataagcacttagacaatgaaggaaagctggagttgctgcacatgatgtccaacgttatgtcaaagaataagatcgggctgcacaatgcacaaggcaagataaagtgtcaaatgaagaattgaagctgcaggattcacgatgtcggatacaatgtccaggacatcctgcctgaaaatactggaattgctaaaagcattaagcgcanagcatgcaattct

SEQ ID NO: 6569 - DNA, 837 bp, Glycine max
ttacaactaacatgtttcagaatatttttccaacaattgatgtcaaaactgtgagtttataggcacacatacacatcaatgacttacttgacatccaagtccttcatctcctaatgtcacaacttgttatttcaggttaagctctccacatgccaaagaattgtgttgcttaattacaacaaaggcactaagctcattgattttcgccattattccataagactacaacctgtaggtgtttcacgcagaataagaaaacttgtgcagagccatcaggttcctgatctaaggaatcttctagatgttagtgattttgtcacaaagtaagatacttgcttattcattcaagttttcatttttcttttcctttttgaatgacgaactgagagagctggtatgatccatttgacctttgcatggcacccatattatccttatttaaataggcagatatgatattttagagtatttagatatataacaaacagaaacctattcaacttgctcttagttcttcgttttgtttttcgatgtaactctttgttcctgtgagtgtacaaatattatattttaattggaaggttcaaatattaggtttccctggaaaggaaggtacatttgcttatgagtttaggatctgaataactttctctttgccagttgctaaatatttatgttgggaggcataaataataagcaatgacaagaatttttttaatattcttttcttttcttttctcaaccactcagtatagaacccaagattaacctttgaaactgttgtctatataaatttgccaaaatggtttttgaaagtttttttccaatagtgacata

SEQ ID NO: 6570 - DNA, 844 bp, Glycine max
aaactccaacagattttaaattgttgtagaattcatctagcacaagagaaaggctctgagttaaagttgatgagtacgagtgatctgaacttgcggctgtttggaacgcctcaaaatcctccatccactagacacaataaatttcacaaaagaaaaaaatgaacaacaaatagattttactagttaaccagaacctgatgttagtgagtgagtagatcacaacatcctattattaaccaaaaaaatgaagtaactaatctaaccaacacatctttttcaataaaactaaagaaaattcattatagataaacaatacctccaaagcaaactgatgtgctgctacatcaaccttgttgaaagtcaagatgagaggtaaccttgtcttgtagaggatactacaagcatacaacatgttgctcatgaaagtggtgggatcttctgaacggggtgtatcaactacataggcaactacagtgggaaatgtagatgcaaaagcttctgtaatgatagcaccagaagcagaccaggtaaatatttcaatctgaccaggggtatccacaagaacatagtcaagttgatctgcccgtttctcaattacagaaattacctgaaaatgaggagcataaacattaaatgatgtggtgcaactgtaagactaaaaacaaatgaggacacaaatgagccactaatcatgtacacaatacaatctcaactcaactgtaccaccaagagcttaattgggaaaagtaaaaccaaaacataagatcaaagaagctcaaggaagctctctgcctcaataattgaaaatgagcccgggatcatgtattactatactactattatc

SEQ ID NO: 6571 - DNA, 842 bp, Glycine max
tgattcgccagcttgatgcctgagggagtttacacatgaaactaagacaaactggactcatgaatgccagattccggcaacatcttgtgaagatgtggcgaccaagcctgaagcatcagggtccactgagcaggagaaagttttgaatgtagataagttggctaacattgtatatcaagaacatggagggtgtttgaaaaaaccgagagggaagagaaagaggaaggattgtagcagaagtattaacgaagtaagtgtaagagaaagtgatttttcagctgatgtgtgtaaagaaagttctctcagctactgtggcgagattgttaaatcttctggtgtgaatgaggagaatgcaaacttgaaaacggctggaataaaagatttgatggagctcttagattcttttttggtagttcaaggtgcttctgtcttcacttataagcatgataaccaggtatgtgtaacttatatcccattctattcttctatagttggcttttaacttttctcaccatgtaatgcttttgattatagactaatggatttgtggtgttcgttattctttagggtgcacttgttatgaaaagaataggagtgggagagagagagagagagaaacataaaataatcatgtacttaacatccccaattgtgcacctagagttaaggttcttgactcattttaatgggtcctatcttgccacatttgatttaaaaacattaaaatccttttactccaatggtgcaatcatgtaagaacttaaaatgagtctcacattgtctcacaaaatgtttattttttaatcataagaaccgattcttatagctggaaagtatgtcaa

SEQ ID NO: 6572 - DNA, 829 bp, Glycine max
tttttgtgtctctagctgctgagtatgaaactcctaagaattccttcaatcaggtgagtttattagtttgtttgcttctacatttgaaataaaatatttaaactgtaattaaggttgtcacttgtcggctcctttttataaaggaaagaataaaatgaagccatagtaatagtagcttcagagtttgtttagactatgcatgtcactcagatagttgtgcttttgctgcataatgtgttgtatctgtgccatttttcgtatatgtcgtgtcacaaatgttgattaggttcttgaaatgccattttacagatatctctatggggtggtatccttccctctaaagagcatgccaagttttggattcatacatcaaataagcaccgcttcattgaccaggtatacaaactctcaaaggatgttttaatttatgatttgcttcagatttctttaggccttatttatttctattttttcatgtccagggaagcaatttgcgtggcaaagaatataatctgactttgcattggcatgttatgccaaaaactagcaaaatgtttgcagataaaatagtcatgccaagttaccgattgccagaggaatatagatgatgatgcctactttttcgtgttaattcttttgctgctgtaggtttaaccttttctataacggatatagaaggttagttcaaagaactagaatcagggagtttgtgttttggaaagtgaaatcaatagcgtttcaatgaattacatgacattgggaagttgattgtggtcctcaatgggctcttggcttatctttacttttttttcctacctccacgaaaaag

SEQ ID NO: 6573 - DNA, 875 bp, Glycine max
  misc_feature (754)..(754): n is a, c, g, or t
agatatacaaaattttatgggacttctgagaaagctgcggcagacttggcccatgatgcattgacacgtatgttgtatgatttgattgaaattgatattctccaggcctttggtttacttgcattgctgttgtatattaatcacgtttcaaaagatgatggaaaaaaaaagatacaaatgtttctgaagtgattgatggtttcatctgtggcatttaaagaccttattaaattttaaattcttaacagattacaatcggtgggaagaagagattgagaaatggcagaatcctattcttaaggatgagacactacctgaatggtaattctcggtctaacttctatagtatttttaagtatcactggatttttttgtgtgttattggtcattttcagattattattatagaatgaagattttaaagtctaggacatactacaagacacaaagcagaacttggtttttcgtagctgattttggcactttcattgtgcaaagatttgcattttagacttgttaaaaaacttcactgtgttctagaaatggtatctattatgtttcaagcaaagacatacccaaattatgtttcattatagtaatcagttttcttttgttaaaacggttgggtttatgggacctataagttagcagttatcaatcagtcatttagtaaaacatactgttatttctatttttaaattctttgaactgagcatttatgctcatgtagtctcttcaagagttttcctatggnctttgcctaccttgatttatgaaactgtcctctatctaatcaactcttattgtggctgtatttggtcgtgaaatacataaatgtatttaaaattatttatacaggtacaaatttacattgt

SEQ ID NO: 6574 - DNA, 875 bp, Glycine max
agtgtatataaactcttgcatgaatttcaatatctgtttttttacacattttatctttatgcattttaagatgtaaattcagcaaatgaactttgacatccatgcatgatgaagaatctctgaatatagatttctctaataatttgtacactacttgcaatagtttagtctgctagttactactaaacctaatggacatgccatgacatcagtcacatagcatatacctcgagttgaaatatagtactatattttaactatatatatatatatatatatatagaatatatcatcattatgttattttaatagcagttgaatattataatttatgcttcagtcttgttccttttacttgaatgacgatttggaaagccctcgcgcaattggacccttctttaggctctcacggtcaaggaaaagatgatggcagcatcaaccacatggttattcagtttgtgtccccactaacggcattcccattttgaacaataagtctctgttgggttaagtgaccctgatactgtatcaaattgtatctgttttcccctcttatggaatttccaagccaactttcttggtgttagtgattttttttctaagcagcatggattggtatttttgctattcacaatattcacgtgcctaccatcattaatctcactaactgcatcatcccatccaaactgaacagacagattggcataattggtctattggggtgggtgagatattattgtattttaaagttgtactcgaagacttgatatatggtatagcagaatattggacacggaatctaagataaagttgtaaggggagaaagctggaagcatattggatgtaaattccatgatattacattatagaaaacc

SEQ ID NO: 6575 - DNA, 859 bp, Glycine max
attaggctcatcatcacaaaacaaatccataacagaaaattccgagtctgagaacaaggacaaatcaataggtgagacgaagaaagtaaggataggcaattgatgattttgaaaaaggaaaagcaaagatagatgttaaataaattccagtgttgtggcctcgaaagaaaaattgctaagataaaatctaaaatttagtactatagcaagaaacacatccccaacatacgtttgttgaagatctatgatatacttcttacattgatcagttactgtcttccattgatttgggggtccattaaaagcagtattctggtgatcaggagcactcctgttaagtggggaaaaaaaaagtatcaattctttaaatgctgaaaaaaattgggttttaggtgaaacaaataagtatggttgcaggttagcctagaaagagtccgcttgtaattttcgacatattcatccaactcccaaaaggagaagaaagaagcatgagaagtgggaaacatctggatggaaataagaggtgaaacaaccaaagcaaaccaatgaaaggtttggttcagttccaaattctgttattaggtttatctttaaactgttttgattaatttcatctagagttatgaaaatttctaagccacagactgaacaaactcaactgataaaaatctttaaagcttggaaccatgccaatccaactcccacatgcccataaaaagaaacaaaaggcataatggactcagaagaaaccagtgaatgacatttgtttctagccatggatatattactatgtggagcaataagttgagatggaacaattgaaatcatgcatacaagtaggcaatgcagtcattctcca

SEQ ID NO: 6576 - DNA, 865 bp, Glycine max
  misc_feature (822)..(822): n is a, c, g, or t
gttggataagtctttcacatgatcaacctttaagtattaactgttgtcctcaactctgatccactttgttaatttagtttctccaaaatttgatgcatcattattgtcttaagtcttagtcacggagttttttttttttaacttttagattgtgatcttgaaccatatttcatttctttcggatggctcttgcaagttgcgattttgaaggcatacaccccgacttgtttgtgtaattttgggtcactgttgttggtaacatttttgtcttggaggattgcccctgaatagaggaaaatacttgtcatggtgaaattctgttagatgactaatggccctttgattctattttttttgtaatgagaactaaactgggaatgttcaatatgattaagctgatgtaagtttcattagaacttgaatggatttgaatttggagttaagaaattgagaggtaaataggaagtcctagttcactagttgcgtttgctctatgatttttttttttggcatgtagcgcataatgggcaaagtcattgtatttcaatgctattatgctacttttatggcctattagttattttgcttacaaagtcactagctcagaagaaatggatgcattttctgccttttctttaaatgaaggcacacaattgaggagatccatatggctcgtatcagttgtaagtgatgatccaaacgatttcattttgcatttgtgggtggtaagctcgagtagaacttggattgatctctggcacctattatagtatatatttgagcatactagtttatttttttgtgaaagctctttggatgaantatgtttcatgcttcatcatttaaatacttaaagtctaatatg

SEQ ID NO: 6577 - DNA, 772 bp, Glycine max
acccgctgtacgagcagctgctgtcggcgcacgtggcgtgcctccggatcgccacgccggtggaccagctgccgaggatcgacgcgcagctggcgcagtcgcagaatgtggtcgcgaaatacgcagcgttcggacacaacaacatcgtcgccgatgacaaagaactcgaccagttcatggtatataataatcaattatcaatttttttttttgctttccattttccttttatttattagacaattaatgattctcgttgttttttgttttgtttcttaattggcgtgaaaatctgaggatttggatttgtttcttgttgattttggattcatcatttaattaattgttatattttaattttgttttattttgattttttggtcttcggcgtgtcagtattggaattcgcgtggcctgcattattttatagtgctggagccagatgaaatttgcagcttttgttgcttgaaaaatgagactttaagtttatattgcaaaattaaggttttaaattatgttcgcagtagatattttttcgcaatctttaatattgtagaaaattgcagacaaacgaacaaatgaaactgatgggattgcaattttggattagaatgaaaaactgatctcgtgagaagtgaaattgtgattgtgaattgaatgaaagatgctaatggctcaaatttgagttattgagatggcttttgaagtgctgaatttagtaattgggatgcttttaaatttgatcacttttatgagctggtttggggatata

SEQ ID NO: 6578 - DNA, 4522 bp, Glycine max
atggatggtaaaaattcaaaactaaaccccacacaatttagtgacacagaatataattagcgttgttctttttacagaaaacgacgagaacaaaggtgtcaaaggaaaggagatggatgcatatggtatgagctcatccaattccaaacatgttgtggaccaaaagcgaagtaccatgaacatgatgatcacgacgattcttctcagattttgggaccgctatgatatgaattgcgactacactactaactcttacgaaccggggtcatcataaaaccattaccatttaccactcttttgaacgttaatgtagcctaaatcttatatccagagaaccagaccctgtttaaatttcctttttaaaacgtttctgataaatttctcttgctagtgtctcagaacccagttagctccttcctcaccacgtgacacttcagtgaaacttggagatgccagcaggtttatttcagccagggtctttgtctctcagggcaattcattaatttaaaaaataacatttttttatacatattcatcagtgcacgaggaggagggatagtgtgtatcacactttttaattcactttctattgttttctgttagttgaaattcaaatatccctcactaatttgagactgaaacatttcaccaaaaaaaaaaaaaattgaggatggaactttcttttttagttgatcataaattttttcttctaaaatatataatgtggatacatattttttgagattgaaacctaacaaatgataaataagactcacttatttagtgagacatacatgaatttcagagaatattttcctatataggttattagcatttcttttaatattttttttattattgtcttatttttaaaaagttggcattctttttaaaattgacttttttgtgatattgaactattttaataataataataaaattaagttatatagtgtattaaaaagaataagataaaatgtgttttaaatttctcaagattttagtcaaaattagtttcagtctcctctattaaaaatgtgttttaattctcatatttttaaaaatatggtgaatttcatttttaatcttgaacagttctttaattttgacttaattaaattcaacatatttcagaaacacgggaaccaaaaccaccatttttagaatccaagactaaagatcttaatgacgtaaaacacaatttacccgtgagaatattaaagctagtagtattgcttttcagtgtgtttcctacggcacattgttgtgtgtggaagtggaagctagaaaacaaaggcagcagaagaagtatggtcctacaaagtgtgtagtagtgaagaagaaatagccgttggtggtggagaggcgcgggtttgcaataaaagaacagcgcgccatgatcctataataaaccctgtcaacaaaaacaagtatgcttcatgaatagttactatttacaaggaaaactagccgttactcactttttcttcttttttttttttgtaacaaattctgaaccctgcatgttcattctctctctctcacgctcgcaacccgcgcgcgcacctacacttcttttatgtcatcacgtgctccttctcactctccctctctctcactacaaaaaccattcttcaacttgcaacacacgcacacacacacactcacacacactgtttttttgttccactaaatcaaaacctcttatctcttactctcattacattcattcttttgattttcgttatggtagtagcagtggagaaaaccaacctcacttcacaatcacaatgcttcaaccgtgtttctgacaagaagaaagaaagatgcaagacacacatgaacaacgttaacccatgttgttttttgtttctcttatgtgtgtggagccttgttgtgctcccctcatgcgtgaggccagttttgtgtgaagatgaaggttgggatggagtggttgtgacagcatcaaacctcttagcacttgaagctttcaagcaagagttggttgatccagaagggttcttgcggagctggaatgacagtggctatggagcttgttccggaggttgggttggaatcaagtgtgctcagggacaggttattgtgatccagcttccttggaagggtttgaggggtcgaatcaccgacaaaattggccaacttcaaggcctcaggaagcttagtcttcatgataaccaaattggtggttcaatcccttcaactttgggacttcttcccaaccttagaggggttcagttattcaacaataggcttacaggttccatacctctttctttaggtttctgccctttgcttcagtctcttgacctcagcaacaacttgctcacaggagcaatcccttatagtcttgctaattccactaagctttattggcttaacttgagtttcaactccttctctggtcctttaccagctagcctaactcactcattttctctcacttttctttctcttcaaaataacaatctttctggctcccttcctaactcttggggtggaaattccaagaatggcttctttaggcttcaaaatttgatcctagataataactttttcactggtgacgttcctgcttctttgggtagcttaagagagctcaatgagatttcccttagtcataataagtttagtggagctataccaaatgaaataggaaccctttctaggcttaagacacttgacatttctaataatgccttgaatgggaacttgcctgctaccctctctaatttatcctcacttacactgctgaatgcagagaacaacctccttgacaatcaaatccctcaaagtttaggtagattgcgtaatctttctgttctgattttgagtagaaaccaatttagtggacatattccttcaagcattgcaaacatttcctcgcttaggcagcttgatttgtcactgaataatttcagtggagaaattccagtctccttcgacagtcagcgcagtctaaatctcttcaatgtttcctacaatagcctttcaggttctgttccccctctgcttgccaagaaatttaactcaagctcatttgtgggaaatattcaactatgtgggtacagcccttcaaccccatgtctttcccaagctccatcacaaggagtcattgccccacctcctgaagtgtcaaaacatcaccatcataggaagctaagcaccaaagacataattctcatagtagcaggagttctcctcgtagttctgattatactttgttgtgtcctgcttttctgcctgatcagaaagagatcaacatctaaggccgggaacggccaagccaccgagggtagagcggccactatgaggacagaaaaaggagtccctccagttgctgctggtgatgttgaagcaggtggggaggctggagggaaactagtccattttgatggaccaatggcttttacagctgatgatctcttgtgtgcaacagctgagatcatgggaaagagcacctatggaactgtttataaggctattttggaggatggaagtcaagttgcagtaaagagattgagggaaaagatcactaaaggtcatagagaatttgaatcagaagtcagtgttctaggaaaaattagacaccccaatgttttggctctgagggcctattacttgggacccaaaggggaaaagcttctggtttttgattacatgtctaaaggaagtcttgcttctttcctacatggtaagtttcgtgtgctgttctttcattaagtgttgtgtgtgctgttctttaattataatttggagttttaccttagtaatctgtataattctaatcggagaacagtacaaacaaaaacacctaaggaacactatagcacctaaggaacaacaccttagctttaatataccatatcaataagtgaattattttcttgttcatcttgatgcaggtggtggaactgaaacattcattgattggccaacaaggatgaaaatagcacaagacttggcccgtggcttgttctgccttcattcccaggagaacatcatacatgggaacctcacatccagcaatgtgttgcttgatgagaatacaaatgctaaaattgcagattttggtctttctcggttgatgtcaactgctgctaattccaacgtgatagctacagctggagcattgggataccgggcacctgagctctcaaagctcaagaaagcaaacactaaaactgatatctacagtcttggtgttatcttgttagaactcctaacgaggaaatcacctggggtgcctatgaatggactagatttgcctcagtgggttgcctcagttgtcaaagaggagtggacaaatgaggtttttgatgcagacttgatgagagatgcatccacagttggcgacgagttgctaaacacgttgaagctcgctttgcactgtgttgatccttctccatcagcacgaccagaagttcatcaagttctccagcagctggaagagattagaccagagagatcagtcacagccagtcccggggacgatatcgtatag
